(19) United States
(12) Patent Application Publication
(10) Pub. No.: US 2024/0335516 A1
(43) Pub. Date: Oct. 10, 2024

(54) COMPOSITIONS AND METHODS FOR THE TREATMENT OF SPINAL MUSCULAR ATROPHY (SMA)

(71) Applicant: Beam Therapeutics Inc., Cambridge, MA (US)

(72) Inventors: Shaunna Berkovitch, Cambridge, MA (US); Jason Michael Gehrke, Cambridge, MA (US); Holly Rees, Cambridge, MA (US); Conrad Rinaldi, Cambridge, MA (US); Tanggis Bohnuud, Cambridge, MA (US)

(73) Assignee: Beam Therapeutics Inc., Cambridge, MA (US)

(21) Appl. No.: 18/744,175

(22) Filed: Jun. 14, 2024

Related U.S. Application Data
(63) Continuation of application No. PCT/US2022/081825, filed on Dec. 16, 2022.
(60) Provisional application No. 63/291,290, filed on Dec. 17, 2021.

(51) Int. Cl. A61K 38/50; A61K 31/7105; A61K 38/46; C07K 14/47; C12N 9/22; C12N 9/78; C12N 15/11; C12N 15/90

(52) U.S. Cl. CPC A61K 38/50; A61K 31/7105; A61K 38/465; C07K 14/4702; C12N 9/22; C12N 9/78; C12N 15/11; C12N 15/907; C12Y 305/04004; C12Y 305/04005; C12N 2310/20

(57) ABSTRACT

The invention of the disclosure features compositions and methods for treating spinal muscular atrophy (SMA) by introducing alterations to a survival of motor neuron 2 (SMN2) polynucleotide(s) in a cell. In particular embodiments, the invention provides a base editor system (e.g., a fusion protein or complex comprising a programmable DNA binding protein, a nucleobase editor, and gRNA) for modifying an SMN2 polynucleotide(s), where the alteration is associated with increased expression of the SMN2 polypeptide(s) encoded by the polynucleotide(s).

### CROSS REFERENCE TO RELATED APPLICATIONS

[0001] This application is a continuation under under 35 U.S.C. § 111(a) of International Application No. PCT/US2022/081825, filed Dec. 16, 2022, which claims priority to and benefit of U.S. Provisional Application No. 63/291,290, filed Dec. 17, 2021, the entire contents of which is hereby incorporated herein by reference in its entirety.

### SEQUENCE LISTING

[0002] This application contains a Sequence Listing which has been submitted electronically in XML format and is hereby incorporated by reference in its entirety. The Sequence Listing XML file, created on Jul. 1, 2024, is named 180802_046103US_SL.xml and is 1,247,242 bytes in size.

### BACKGROUND OF THE INVENTION

[0003] Spinal muscular atrophy (SMA) is a genetic disorder characterized by weakness and wasting in skeletal muscles, which is associated with the homozygous deletion and/or mutation of alleles of the survival of motor neuron 1 (SMN1) gene located on chromosome 5q13. It is characterized by degeneration of the alpha motor neurons in the spinal cord, which causes proximal, symmetrical limb and trunk muscle weakness that progresses to paralysis. SMA affects 1 per 8,000 to 10,000 newborns worldwide and approximately 1 to 2 per 100,000 persons. Outcomes in the natural course of the disease vary from death within a few weeks after birth to normal life expectancy. If left untreated, the many children diagnosed with SMA do not reach the age of 4, with a primary cause of death being recurrent respiratory problems. Long-term survival in severe cases of SMA is uncommon.

[0004] Thus, there is a need for improved compositions and methods for the treatment of SMA.

### SUMMARY OF THE INVENTION

[0005] As described below, the invention of the present disclosure features compositions and methods for treating spinal muscular atrophy (SMA) by introducing alterations to a survival of motor neuron 2 (SMN2) polynucleotide in a cell. In particular embodiments, the invention provides a base editor system (e.g., a fusion protein or complex containing a programmable DNA binding protein, a nucleobase editor, and a guide polynucleotide) for modifying an SMN2 polynucleotide, where the alteration is associated with increased expression of the SMN2 polypeptide(s) encoded by the polynucleotide.

[0006] In one aspect, the invention features a method of editing a nucleobase of a survival of motor neuron 2 (SMN2) polynucleotide. The method involves contacting the SMN2 polynucleotide with a guide polynucleotide and a base editor containing a fusion protein or a protein complex containing a nucleic acid programmable DNA binding protein (napDNAbp) domain and a deaminase domain, or a polynucleotide encoding the base editor. The guide polynucleotide targets the base editor to effect an alteration of the nucleobase of the SMN2 polynucleotide.

[0007] In one aspect, the invention features a method of editing a nucleobase of a survival of motor neuron 2 (SMN2) polynucleotide. The method involves contacting the SMN2 polynucleotide with one or more guide polynucleotides and a base editor containing a fusion protein or a protein complex containing a nucleic acid programmable DNA binding protein (napDNAbp) domain and a deaminase domain. The one or more guide polynucleotides target the base editor to effect an alteration of the nucleobase of the SMN2 polynucleotide.

[0008] In another aspect, the invention features a method of treating spinal muscular atrophy (SMA) in a subject in need thereof. The method involves contacting a cell of the subject with a base editor containing a fusion protein or protein complex containing a nucleic acid programmable DNA binding protein (napDNAbp) domain and a deaminase domain, or a polynucleotide encoding the base editor, and a guide polynucleotide, or a polynucleotide encoding the guide polynucleotide, that targets the base editor to effect an alteration of a survival of motor neuron 2 (SMN2) polynucleotide, thereby treating SMA in the subject.

[0009] In another aspect, the invention features a modified cell containing an alteration in a nucleobase of a survival of motor neuron 2 (SMN2) polynucleotide. The alteration increases expression and/or activity of the encoded SMN2 polypeptide as compared to a control cell without the alteration.

[0010] In another aspect, the invention features a base editor system containing a fusion protein or a polynucleotide encoding the fusion protein. The fusion protein contains a nucleic acid programmable DNA binding protein (napDNAbp) domain, a deaminase domain, and a guide polynucleotide containing a spacer sequence selected from Table 2A or Table 2C.

[0011] In another aspect, the invention features a polynucleotide encoding the base editor system of any one of the above aspects, or a component thereof.

[0012] In another aspect, the invention features a pharmaceutical composition containing an effective amount of a base editor system containing a fusion protein or a polynucleotide encoding the fusion protein. The fusion protein contains a nucleic acid programmable DNA binding protein (napDNAbp) domain, a deaminase domain, and a guide polynucleotide containing a spacer selected from Table 2A or Table 2C.

[0013] In another aspect, the invention features a guide polynucleotide containing a sequence listed in Tables 2A-2C.

[0014] In another aspect, the invention features cell produced by the method of any of the above aspects.

[0015] In another aspect, the invention features a kit containing a base editor system containing a fusion protein or a polynucleotide encoding the fusion protein. The fusion protein contains a nucleic acid programmable DNA binding protein (napDNAbp) domain, a deaminase domain, and a guide polynucleotide containing a spacer selected from Table 2A or Table 2C.

[0016] In any of the above aspects, or embodiments thereof, the polynucleotide is in a cell, and where the cell is in vivo or in vitro. In any of the above aspects, or embodiments thereof, the cell is a mammalian cell. In any of the above aspects, or embodiments thereof, the cell is a rodent, non-human primate, or human cell.

[0017] In another aspect, the invention features a vector containing a polynucleotide of any of the above aspects.

[0018] In any of the above aspects, or embodiments thereof, the cell is contacted with two or more guide polynucleotides. In any of the above aspects, or embodiments thereof, the guide polynucleotide contains a spacer selected from those listed in Table 2A or Table 2C. In any of the above aspects, or embodiments thereof, the guide polynucleotide contains a nucleic acid sequence containing at least 10 contiguous nucleotides of a spacer nucleic acid sequence listed in Table 2A or Table 2C.

[0019] In any of the above aspects, or embodiments thereof, the deaminase domain is an adenosine deaminase domain or a cytidine deaminase domain. In embodiments, the adenosine deaminase domain converts a target A•T to G•C in the SMN2 polynucleotide. In embodiments, the cytidine deaminase domain converts a target C•G to T•A in the SMN2 polynucleotide.

[0020] In any of the above aspects, or embodiments thereof, alteration of the nucleobase is associated with an increase in full-length polynucleotides encoding the SMN2 polypeptide transcribed from the SMN2 polynucleotide. In any of the above aspects, or embodiments thereof, alteration of a nucleobase in the SMN2 polynucleotide results in an increase in the number of transcripts transcribed from the SMN2 polynucleotide that include Exon 7. In any of the above aspects, or embodiments thereof, the altered nucleobase in the SMN2 polynucleotide is associated with an alteration in splicing. In any of the above aspects, or embodiments thereof, the alteration is associated with an increase in levels of a survival motor neuron (SMN) polypeptide in a cell. In any of the above aspects, or embodiments thereof, the alteration is selected from one or more of a C10 alteration in Intron 7 of the SMN2 polynucleotide, a C7 alteration in Intron 7 of the SMN2 polynucleotide, a C11 alteration in Intron 7 of the SMN2 polynucleotide, a T6C alteration in Exon 7 of the SMN2 polynucleotide, and a A54G alteration in Exon 7 of the SMN2 polynucleotide.

[0021] In any of the above aspects, or embodiments thereof, the napDNAbp domain contains a Cas9, Cas12a/Cpf1, Cas12b/C2c1, Cas12c/C2c3, Cas12d/CasY, Cas12e/CasX, Cas12g, Cas12h, Cas12i, or Cas12j/CasΦ polynucleotide or a portion thereof. In any of the above aspects, or embodiments thereof, the napDNAbp domain contains a Cas9 polynucleotide or a portion thereof. In any of the above aspects, or embodiments thereof, the napDNAbp domain contains a dead Cas9 (dCas9) or a Cas9 nickase (nCas9). In any of the above aspects, or embodiments thereof, the napDNAbp domain is a modified Staphylococcus aureus Cas9 (SaCas9), Streptococcus thermophilus 1 Cas9 (St1Cas9), a modified Streptococcus pyogenes Cas9 (SpCas9), or variants thereof. In any of the above aspects, or embodiments thereof, the napDNAbp domain contains a variant of SpCas9 having an altered protospacer-adjacent motif (PAM) specificity.

[0022] In any of the above aspects, or embodiments thereof, the cytidine deaminase domain is an APOBEC deaminase domain or a derivative thereof.

[0023] In any of the above aspects, or embodiments thereof, the adenosine deaminase domain is TadA deaminase domain. In embodiments, the adenosine deaminase domain is a TadA*8 variant. In embodiments, the adenosine deaminase domain is TadA*8.1, TadA*8.2, TadA*8.3, TadA*8.4, TadA*8.5, TadA*8.6, TadA*8.7, TadA*8.8, TadA*8.9, TadA*8.10, TadA*8.11, TadA*8.12, TadA*8.13, TadA*8.14, TadA*8.15, TadA*8.16, TadA*8.17, TadA*8.18, TadA*8.19, TadA*8.20, TadA*8.21, TadA*8.22, TadA*8.23, or TadA*8.24.

[0024] In any of the above aspects, or embodiments thereof, the guide polynucleotide contains a nucleic acid sequence containing at least 10 contiguous nucleotides of a spacer nucleic acid sequence listed in Table 2A or Table 2C. In any of the above aspects, or embodiments thereof, guide polynucleotide contains a spacer sequence listed in Table 2A or Table 2C. In any of the above aspects, or embodiments thereof, the guide polynucleotide contains a nucleic acid analog. In any of the above aspects, or embodiments thereof, the guide polynucleotide contains one or more of a 2′-OMe and a phosphorothioate.

[0025] In any of the above aspects, or embodiments thereof, the napDNAbp domain further contains one or more uracil glycosylase inhibitors (UGIs). In any of the above aspects, or embodiments thereof, the napDNAbp domain further contains one or more nuclear localization sequences (NLS).

[0026] In any of the above aspects, or embodiments thereof, expression and/or function is increased by at least 1, 2, 3, 4, 5, 6, 7, 8, 9, or 10-fold as compared to a control cell without the alteration. In any of the above aspects, or embodiments thereof, the alteration is associated with an increase in the number of full-length transcripts encoding the SMN2 polypeptide transcribed from the SMN2 polynucleotide.

[0027] In any of the above aspects, or embodiments thereof, the cell is a neuron.

[0028] In any of the above aspects, or embodiments thereof, the fusion protein further contains one or more uracil glycosylase inhibitors (UGIs). In any of the above aspects, or embodiments thereof, the fusion protein further contains one or more nuclear localization sequences (NLS).

[0029] In any of the above aspects, or embodiments thereof, the napDNAbp is a nuclease inactive or nickase variant.

[0030] In any of the above aspects, or embodiments thereof, the deaminase domain is capable of deaminating cytidine or adenine in DNA. In any of the above aspects, or embodiments thereof, the deaminase domain is a cytidine deaminase domain. In any of the above aspects, or embodiments thereof, the cytidine deaminase domain is an APOBEC deaminase domain or a derivative thereof.

[0031] In any of the above aspects, or embodiments thereof, the deaminase domain is an adenosine deaminase domain.

[0032] In any of the above aspects, or embodiments thereof, the deaminase is a monomer or heterodimer.

[0033] In any of the above aspects, or embodiments thereof, the kit further contains written instructions for the use of the kit in the treatment of spinal muscular atrophy.

[0034] In any of the above aspects, or embodiments thereof, the cell is a neuron. In any of the above aspects, or embodiments thereof, the neuron is a motor neuron. In any of the above aspects, or embodiments thereof, the cell is a fibroblast cell.

[0035] In any of the above aspects, or embodiments thereof, the guide polynucleotide contains the nucleotide sequence ACUCCUUAAUUUAAGGAAUG (SEQ ID NO: 562; gRNA1962); GACAAAAUCAAAAAGAAGGA (SEQ ID No: 514; gRNA1973); UUAAGGAGUAAGUCUGCCAG (SEQ ID NO: 626; gRNA2349); UGCUCACAUUCCUUAAAUUA (SEQ ID NO: 574; gRNA1974); GCAGACUUACUCCUUAAUUUA (SEQ ID NO: 576; gRNA1976); or UCACAUUCCUUAAAUUAAGGA (SEQ ID NO: 592; gRNA1992). In any of the above aspects, or embodiments thereof, the guide polynucleotide contains a scaffold containing the nucleotide sequence:

SpCas9 scaffold
(SEQ ID NO: 317)
GUUUUAGAGCUAGAAAUAGCAAGUUAAAAUAAGGCUAGUCCGUUAUCAA
CUUGAAAAAGUGGCACCGAGUCGGUGCUUUU;
or
SaCas9 scaffold
(SEQ ID NO: 425)
GUUUUAGUACUCUGUAAUGAAAAUUACAGAAUCUACUAAAACAAGGCAA
AAUGCCGUGUUUAUCUCGUCAACUUGUUGGCGAGAUUUU.
In any of the above aspects, or embodiments
thereof, the guide polynucleotide contains the
sequence
(SEQ ID NO: 503; gRNA1962)
ACUCCUUAAUUUAAGGAAUGGUUUUAGAGCUAGAAAUAGCAAGUUAAAA
UAAGGCUAGUCCGUUAUCAACUUGAAAAAGUGGCACCGAGUCGGUGCUU
UU;
(SEQ ID NO: 514; gRNA1973)
GACAAAAUCAAAAAGAAGGAGUUUUAGAGCUAGAAAUAGCAAGUUAAAA
UAAGGCUAGUCCGUUAUCAACUUGAAAAAGUGGCACCGAGUCGGUGCUU
UU;
(SEQ ID NO: 630; gRNA2349)
UUAAGGAGUAAGUCUGCCAGGUUUUAGAGCUAGAAAUAGCAAGUUAAAA
UAAGGCUAGUCCGUUAUCAACUUGAAAAAGUGGCACCGAGUCGGUGCUU
UU;
(SEQ ID NO: 515; gRNA1974)
UGCUCACAUUCCUUAAAUUAGUUUUAGAGCUAGAAAUAGCAAGUUAAAA
UAAGGCUAGUCCGUUAUCAACUUGAAAAAGUGGCACCGAGUCGGUGCUU
UU;
(SEQ ID NO: 517; gRNA1976)
GCAGACUUACUCCUUAAUUUAGUUUUAGUACUCUGUAAUGAAAAUUACA
GAAUCUACUAAAACAAGGCAAAAUGCCGUGUUUAUCUCGUCAACUUGUU
GGCGAGAUUUU;
or
(SEQ ID NO: 533; gRNA1992)
UCACAUUCCUUAAAUUAAGGAGUUUUAGUACUCUGUAAUGAAAAUUACA
GAAUCUACUAAAACAAGGCAAAAUGCCGUGUUUAUCUCGUCAACUUGUU
GGCGAGAUUUU .

[0036] In any of the above aspects, or embodiments thereof, the guide polynucleotide contains one or more modified nucleotides. In any of the above aspects, or embodiments thereof, the one or more modified nucleotides are at the 5′ terminus and/or the 3′ terminus of the guide polynucleotide. In any of the above aspects, or embodiments thereof, the one or more modified nucleotides are 2′-O-methyl-3′-phosphorothioate nucleotides.

[0037] In any of the above aspects, or embodiments thereof, at least 45% of the transcripts transcribed from the altered SMN2 polynucleotide include Exon 7. In any of the above aspects, or embodiments thereof, the levels of the SMN polypeptide in the cell are increased by at least about 50% relative to levels prior to being contacted with the base editor or relative to a reference level. In any of the above aspects, or embodiments thereof, the levels of the SMN polypeptide in the cell are increased by at least about 70% relative to levels prior to being contacted with the base editor or relative to a reference level.

[0038] In any of the above aspects, or embodiments thereof, the base editor contains the deaminase domain inserted at an internal location of the napDNAbp protein.

[0039] In any of the above aspects, or embodiments thereof, the method involves locally or systemically administering to the subject the base editor, or the polynucleotide encoding the base editor, and the guide polynucleotide, or the polynucleotide encoding the guide polynucleotide. In any of the above aspects, or embodiments thereof, the local administration involves intracisternal magna injection, intracerebroventricular injection, or intra-thecal injection.

[0040] In any of the above aspects, or embodiments thereof, contacting the cell involves administering a polynucleotide to the subject, wherein the polynucleotide encodes the base editor, or a component thereof, and/or the guide polynucleotide.

[0041] In any of the above aspects, or embodiments thereof, the polynucleotide is administered to the subject using a vector containing the polynucleotide.

[0042] In any of the above aspects, or embodiments thereof, the vector is a lipid nanoparticle. In any of the above aspects, or embodiments thereof, the vector is a viral vector. In any of the above aspects, or embodiments thereof, the vector is an adeno-associated virus (AAV) vector. In any of the above aspects, or embodiments thereof, the AAV vector is an AAV9 vector or an AAV-PHP.B vector.

[0043] In any of the above aspects, or embodiments thereof, the method further involves: (i) contacting the cell with a first polynucleotide encoding a fusion protein containing an N-terminal fragment of the base editor fused to a split intein-N, and (ii) contacting the cell with a second polynucleotide encoding a fusion protein containing the remaining C-terminal fragment of the base editor fused to a split intein-C. In any of the above aspects, or embodiments thereof, the base editor system contains (i) a first polynucleotide encoding a fusion protein containing an N-terminal fragment of the base editor fused to a split intein-N, and (ii) a second polynucleotide encoding a fusion protein containing the remaining C-terminal fragment of the base editor fused to a split intein-C.

[0044] In any of the above aspects, or embodiments thereof, the C-terminal amino acid of the N-terminal fragment of the base editor is positioned within the napDNAbp domain of the base editor. In any of the above aspects, or embodiments thereof, the C-terminal amino acid of the N-terminal fragment of the base editor corresponds to position 309 or 576 of the napDNAbp and the N-terminal amino acid of the C-terminal fragment of the base editor corresponds to position 310 or 577 of the napDNAbp, wherein the napDNAbp amino acid position is referenced to the following sequence: SpCas9

(SEQ ID NO: 197)
[sequence omitted]

In any of the above aspects, or embodiments thereof, the split intein-N and split intein-C are components of a split intein selected from one or more of a Cfa, Cfa(GEP), Gp41.1, Gp41.8, IMPDH.1, NrdJ.1, Npu. In any of the above aspects, or embodiments thereof, the split intein-N and/or split intein-C contains a sequence selected from those listed in any one of Tables 20A-20C (SEQ ID NOs: 389-424), or fragments thereof functional as a split intein-N or split intein-C.

### Definitions

[0045] Unless defined otherwise, all technical and scientific terms used herein have the meaning commonly understood by a person skilled in the art to which this invention belongs. The following references provide one of skill with a general definition of many of the terms used in this invention: Singleton et al., Dictionary of Microbiology and Molecular Biology (2nd ed. 1994); The Cambridge Dictionary of Science and Technology (Walker ed., 1988); The Glossary of Genetics, 5th Ed., R. Rieger et al. (eds.), Springer Verlag (1991); and Hale & Marham, The Harper Collins Dictionary of Biology (1991). As used herein, the following terms have the meanings ascribed to them below, unless specified otherwise.

[0046] By “survival of motor neuron 1 (SMN1) polypeptide” is meant a protein or fragment thereof, having at least about 85% amino acid sequence identity to a polypeptide sequence provided at NCBI Reference Sequence No. NP_000335.1 and functioning in small nuclear ribonucleoprotein (snRNP) biogenesis. An exemplary SMN1 polypeptide amino acid sequence from Homo Sapiens is provided below (NCBI Reference Sequence No. NP_000335.1):

(SEQ ID NO: 426)
MAMSSGGSGGGVPEQEDSVLFRRGTGQSDDSDIWDDTALIKAYDKAVAS
FKHALKNGDICETSGKPKTTPKRKPAKKNKSQKKNTAASLQQWKVGDKC
SAIWSEDGCIYPATIASIDFKRETCVVVYTGYGNREEQNLSDLLSPICE
VANNIEQNAQENENESQVSTDESENSRSPGNKSDNIKPKSAPWNSFLPP
PPPMPGPRLGPGKPGLKFNGPPPPPPPPPPHLLSCWLPPFPSGPPIIPP
PPPICPDSLDDADALGSMLISWYMSGYHTGYYMGFRQNQKEGRCSHSL
N.

[0047] By “SMN1 polynucleotide” is meant a nucleic acid molecule encoding an SMN1 polypeptide, as well as the introns, exons, and regulatory sequences associated with its expression, or fragments thereof. In embodiments, an SMN1 polynucleotide is the genomic sequence, mRNA, or gene that expresses an SMN1 polypeptide. An exemplary SMN1 nucleotide sequence from Homo Sapiens is provided below, where plain text represents untranslated regions, bold text represents introns, and italicized text represents coding regions (Ensemble Gene Accession No. ENSG00000172062). Splice junctions in the SMN1 polynucleotide sequence provided below are listed in Table 1.

(SEQ ID NO: 427)
AGAAGCCCCGGGCGGCGGAAGTCGTCACTCTTAAGAAGGGACGGGGCCCCACGCTGCGCACCCG
CGGGTTTGCTATGGCGATGAGCAGCGGCGGCAGTGGTGGCGGCGTCCCGGAGCAGGAGGATTCC
GTGCTGTTCCGGCGCGGCACAGGCCAGGTGAGGTCGCAGCCAGTGCAGTCTCCCTATTAGCGCT
CTCAGCACCCTTCTTCCGGCCCAACTCTCCTTCCGCAGCCTCGGGACAGCATCAAGTCGATCCG
CTCACTGGAGTTGTGGTCCGCGTTTTTCTACGTCTTTTCCCACTCCGTTCCCTGCGAACCACAT
CCGCAAGCTCCTTCCTCGAGCAGTTTGGGCTCCTTGATAGCGTTGAGTGGAGGCCCTGCCGCGA
CTTGGCAGTAGCTTATTTTGTTCACTCCTCTCTGGCTGGTGTGGGGGAGGTGGGGGCATTAGGC
CAGGGTGAAGCAGGGGAACCACTTAGGAGTCTGTTAAGATGATCTGAACTTCAGAACAAGATGT
TATTAACAGAGTGAAAGTATTTGGATTCTGGGTATATTTTGAAATCGGAGGCAACAGGTTTTTC
AGATAGATTCGATAACGGAGGTTATCCTGAATAGTTGAAAAGATAAAGTTGCCTTTTGCTGAGG
TGGGAAAGAGAAGATTGCCAGTAGAGCAGGTTTCTCAGGAGTTCAGTCTTGGGCATAGCATGGT
AGGGGTGAATTTGGCTGGAGTGAGTTGGAGAGTAGGAGAAGAGAAATCCAAGGCAACATTTGAC
CAGCCTGGGCAACATAGTGTGACTCCGAGTCTGCAAAAATTAGACGGGTGTTGTGGTGCGCGTC
TGTGGTCTCAGCTACCTGGAAGGTTCAGGCCTTGGAAGGCTCAGGGAGGTGGAGGCTGCAGTGA
TCTGTGATTGCGCCTCTGCACTCCAGCCTGGGCGACAGAGCCAGACCCTGTCTTAAAACAAAAT
AAACGGCCGGGCGCGGTGGCTCAAGCCTGTAATCCCAGCACTTTGGGAGGCCGAGGCGGCCGGA
TCACAAGGTCAGGAGATCGAGACCATCCTGGCTAACACGGTGAAACCCCGTCTCTACTACAAAT
ACAAAAAATTAGCCGGGCGTGGTGACGGGCGCCTGTAGTCCCAGCTACTCGGGAGGCTGAGGCA
GGAGAATGTCATGAAGCCGGGAGGCGGAGCTTGCAGTGAGCCGAGATCGCGCCACTGCACTCCA
GCCTGGGCGATAGAGCAAGACTCCGTCTCAAATAAATAAATAAATAAATAAATAAATAATAAAA
ACATCGGTAGGCATATTTCAAGGAATTCTATTTAAAAAAAATTTTTTTAGAGACAAGTTCGCTC
TCTGTGGCCCAGGCTGGAGTACAGTGGCATGATCCTAGCCCATGGCAGCGTTGATCTCTTGGCC
TCAAGCGACCCTCCTTTGGAGTCGCTGGGCCTAAAGGAGTGAGCCACCACGAAATTTTATTATA
AATGGAGGGTAGAGAAATTGGGCAATAAATGGAGGGGGAAGTGAGTTAAGAGGAATTTTAATTA
TGTGTGTGTGGTTTTAAAAGAGGGGGGTCTTGCTCTGTTGCCCAGGCTGCTGGGGTGCCAGTGG
CGCAATCATGAATCACTACAGCCTTGGACTCCTGGCCTCAAGCTATCCTCCCACCTCTGCCTCC
CAAAGTACTGGGATTACTAGTGTGAGCCACTGCACTAAGATAGGAGCAACATGTTTCAGCATGT
TTGTGGGTTGATAGGAAAGATGAGAATGGGAAAGTTGATGTCGGAAAGAAGACAATGGCTAGAG
CAATGTCCTAGAGTAGGTAAGAAGGGATGGATTTGGCCTTTGTTGGAAACATTAGCGGTTCTTT
TGGTGACAGCTATATAGTTAACACATCTATGATACGTGAATGGGCAGATAGGATGGCAGGAGAT
TTTGAAAGTTCTCTTGATTCTTACTGTTCTCTTAGTGAAAGAAGCAAGGTTATCAGCTAGAAGC
TGGGATGGGAGAGGAAAGAGAAGATGGGAAGTAGATAGTTCTTTAGAAGAGTGGGCAAGGGTTG
GACTAGGGAAGTTTAGTGGAAATATTGCTAGGCAACATAAAGAGCCTACTTGAGATTCGTGGTC
ATGAGTTGAAGGAGACCAGACAGCAAGATTGTGTATGAGGGCACCCACAGAGTAAATGGAGAGT
TGAAATTAATGCAGTTGTGATTTTACCACGTGGATATGAAGAAGTGAGGGGGAGAAGTACAAAG
GAGTTCTCTTAATGATTGACCATGGAATTTAAGCTGGCTAAGAAAGGAAGTGAGAGGCCGGGCG
CGGTGGCTCACGCCTGTAATCCCAGCACTTTGGGAGACTGAGGTGGGTGGATTACCTGAGGTCA
GGAGTTTGAGACCAACCTGGCCGATATGGCGAAACCCCATCTCTAATAAAAATACAGAAAAATT
AGCCGGGAATGGTGGCAGGTGCCTGTAATCCCAGCTACTCAAGAGGCTGTGGCAGGAGTATCCC
TTGGACCCAGGAGGTGGAGGTTGCAGTGAGCCGAGATCACGCCACTGTACTCCAGCCTGGACGA
TATAGTGAGACTTCACCTCAAAAAAAAAAAAAAAAGAAAGGAAGTGAGGATTTTAAGACCCTGA
GAGACAGTTTAAAAAGTGGGAGGATCGGCCGGGCGCTGTGGCTGACACCTGTAATCCCAGCACT
TTGGGAGGCCGAGTTGGGCAGATCACAAGGTCAGGAGTTCGAGACCAGCCTGGCCAATATGGTG
AAACCTTGTCTCTACTAAAAATACAAAAATTAGCCGGGCATGGTGTCACGTGTCTATAATCCCA
GCTACTCGGGAGGCTGAGGCAGAAAAATTGCTTGAACCTGGGAGGCAGAGGTTGCAGACAGCTG
AGATCACTCCATTGCACTCCAGCCTGGGCAACAAGAGCAAAACTTTGTCTTTAAAAAAAAAAAA
AAAAAAAGAATACAAAAATTAGCCGGGCGTGGTGGCGCGTGCCTATAATCCCAGCTACTTGGGA
GGCTGAGGCAGGAGAATCAGTTGAACACGGGAGGCGAGGTTTGCAGTGAGCCGAGATTGCGCCA
CTGCACTCCAGCCTGGGCGACAGAGCAGGACTCCTCTTGGAAAAAAAAAATTAGCTGGGCATGG
TGGCAGGTGCCTGTAGTCTCAGCTACTAGGGAGGCTGAGGCAGGAAAATCACTTGAACCCGGGA
TGTGGAGTTTGCAGTGACCCGAGATCGTGCCACTGTACTCCATCCTGGGCGACAAAATGAGACT
CTGCCTCAAAAAAAAAAAAAAAAAAAAAAAAAGTGGGAGGATCAATGTACTGCCAGTCCTAATG
AAGTGGAATGATTGTCCCCATCAAATCACTAGTAGGAGTAAGTTGCAGAGCCTAGAAGGTGATG
GTTAAGAGAGTGGGATTCTTGAAACTGCATTTATGGAGAGGTTGTGGTTATTGGTTATAATAAA
TAAATACAGTTGAAGTGAGTGAGTAGCTGAGATTTGGGGATGTATCAGTTCATTCTTACACTGC
TACAAAGACATACCTGAGACCAGGTATTTATAAAGATAAGAGGTTTAATCAGCTCACAGTTCTG
CTGCCTGTACAGGCTTCTCTTGTGGAGGCCTAAGGAAACTTACAGTCATGGTGGAAGGTGAAGG
GGAAACAAGCACAGTCTTCACATGGCCAGCAGGAGAGAGAGAGAAGGGGGAAGTGCTACATACT
TTAAAACAACCAGATCTTGTGAGAACGCTTATCAGGAAACAGCACTTGGGGATGGTGCTAAATC
ATTAGAAATCACCCCCATGATCCAGTCGCCTCCTACCATGCCCACCTCCAACACTGGGGATCAC
AATTCAGCATGAGATTTGGGTAGGAACACAGAGCTGCACCACATCAGAGGATGTACAAGATTGT
GGTGGAGAGGAGTTTAGAGACCTGCAAATATAGGGTAATTGAAGGGATCATCTACATGGATATT
TAAATCACCAAAAATTATGACAGGAGTAGTGTTGGAGAGAGAACTGCGATGTAAACATTAAGGA
ATGAGGAAGAGTGACTCGGTAGGCTGTAGGTGACTGCAATAGGAAACGATAATAGACTGTGAGT
CTGGTGACAAGATTTTCCTTCTTTCTTTTTTTCCCCCCCCCCGAGACAGGGCCTCTTTTTGTTG
CCCAGGTGGGAGTGCAGTGGCGCGATCACGGCTCACTACAACCTCCTCCCAAGCTCAAGGGATT
CTCCCACTTCAGCCTCTCAAGTAGCTGGAACTACAGGTGCTGACCACCATGCCTGGCTACTTTT
TGTCAGGATTTTCAAGGCTGGGAATTTTGAGAGGGGAATGGAGGAGAATAATCTGAAAGTGCAA
GTAAGGAGCAGGGAAGATTTCTTTTTTCTTTTTTTTTTTTTTTTTTGAGTCGGAGTCTGGCTCA
GTCGCCCAGGCTGGAGTGCAGTGGCGAGATCTCCGCTCACTGCAAGCTCCGCCTCCCGTGTTCA
CGCCATTCTCCTCCTTCAGCCTCCCGAGTAGCTGGGACTACAGGCGCCCGCCACCACGCCCAGC
TAATTGTTTTTTTGTATTTTTAGTAGAGACGGGGTTTCACCGTGTTAGCCAGGATGGTCTCAAT
CTCCTGACTTTGTGATCCGCCCACCCCGGCCTCCCAAAGCGCTTGGGATTACAGGCGTGAGCCA
CCGCGCCAGCCAGAGCAGGGAAGATTTCTTCCCCACATCTCCAGTAGGTACAGTGATATGAAGT
GTGTGGAGGAGAAAAGAGGAAACATCTATCATTTGAGATGGCTGCGAAAGGAAAAGGCATCCTC
AGGGAGCTAGATTTTACTTAGAGCAAGAAATGAAGGGATGATTCAGAGGTTAAAAGAGTGGATT
TTATGAATTACTCAAGGGAGCACAGTGGAAGTTTCAGGAAGTGGTAGGAGAAGGTAGAAGATGG
CAGGGTGTTGGGAATAATTTGAGAAATCTGAGCTACTGGAAATGACTGAGAATCAGATATAAAG
GCAGTCCTGGTGGTCCGTTCTGGCTGCCGTTGCTGTGTAACGAATCTGCCAAAACTTAGTGGCT
TGAAACAACAAAGAACATTTTATTATCTCTCATTGTTTCTGTGGGTTAGGAATTTGTGAGAGCC
GTGCTGGGCAGTTTTCGTGCGGCTGTCTCGTGGTTGCACCTACATAGTTGCTAGAGCTACAGTA
GCTGGGGACTGAGCAGCTAGGGATTGGCAGGCTATCTCTTTTTTTCATGTAGTCTCATGAAGAT
TTCTTTATGTGGTTTCAATGTGTGGGCTGGTTTGGATTTCCTTATAGCATGGTGGCCTCAGTTG
GATTGCTGTTTTGTGATCCTTTTCATCCCTCCTTGTCCTGTCCCCAGACAACCACTGATCTACT
TTCTGTCACCATAGATTAGCCTGCATTTTTAAGAATTTTTATAAACGTGGAATGATAGAGTACC
TTTTTTGTCACGTTTCTTTTATTTATCATAGCTATTTTGATTTTCATCCATTTTATTGCTGAGT
AGTATCCCATTGCATGTATATACTATACTGTATTCATTCGCTTGCTTGTGAACATTTGGGCTTT
TTCCAGTTTGGGACTGTTAACAAGTAGAGCCACTATGAATATTAGTGTATAAGACTTCATATAG
CCAAGGCTGGCAGATCGCTTGAGCCCAGGAGTTTGAGACCAGCCTGGGAAACATGGTGAAACCT
CTATTTTTATTTTAAAATCAAAAATTAAAAATTTTCTATAAAAAATTTTAAAGAAGACTTTGTA
TAGACATACGCTTTCATTTTTCTTGAGTGAATACTTAGGTCTCAGGGTAGATGTATTTTAAGTC
TTTAAGGAGCTGTCAAACTCTTCCTCAAAGTGGTGGTTGTACCATGTTACTTTTTAATATAACA
GAGATTAATTGAGCAAAGAAAAATTCAAAAGTTGGACAGCCCCCACAACTAAATAGGTTCAGAA
CAGCTCCCCCATTTTGCATTTTGACCAGCAATGTATGAAAGTTCCATTTGCTCAGTGTCCCTGC
AAACACCTGGTATGGTCAGTCTTTTTAATTTTAGGCATTATAATAGATATAGTGGCTTCTTGTG
ATTTTAATTAGCATTTCCTAATGACCAGTGCTGCTGTTGATCATTTCATGAGTGTATTTGCCAT
CCGTATATCTTTTTTGGTGAAGTGTCTATTCAAATCATTTGGGTTTTTTTTTTTTTTGTTTTTT
TTTTTTGGAGACAGTGTCTCACTCTGTCACCCAGGCTGTTGTGCAGTGGTGCAATCACACAGCC
TACTGCAGCCTCCACCTCCTGCGCTCAGTCTTCTTGTCTCAGCCTTCTGAGTAGCTGAAATTAC
GAGCACACGCCACAATGCCTGGCTAATTTTTTAAAATTTTGTAGAAACAAGGTCTCATTATGTT
GCCTGGGCTTGTCGTGAACTCCTGGGCTCAAGCAATCTTCCTGCCTCAGCCTCCCAAAGATTGG
GATTGCAAGTATGAGCCACTGCACCCGGCCAACTTACCCATCTTTTAATTGAATTTTTTTGTTG
TTGAGGTTTGAGAGTTCTTCATGTTTGCTGGGTACAATATCTTTATCAGATAGGTAACTTGCAT
GTATTTTCTCCCGGTTTACACTTTGGTTTTTCATTTTGTTAACAACGTCTTTTTAAGAACAGAA
AATCTTAATTTTGCTGAAATCTAATTTTTCAGTTTTTTCTTTGATGGTTTTGAGAGAGGAGGTA
AAAAAAGACTAGGTAAGCCGATAGTTAGACAGAGTCCTCGGTAGAACTTCCCTTCTAACAAAAA
GCAGCCCAAGAAATCACTTCTCTTCTAACAAGGAGCAGCCTGGAAGATCGGGCTGTAAACATGT
ATAAGGAAGCAGCTCTGGCACAGAGGGGGAGCTTCCTGGGTAATCAGCAAGCTTCACATACGTA
AGGTGGGTATGTGAAGTAAACACAGTATGTGAAGTAAACACAGTGGACCTTAGTACATACTCAG
ATAAGGAAGCTGGAAGCTTGCATGTTGTGAGTTGTTGGGGTTGCCTGCAGCTGCACGGAGAGAA
AGGGGTACCTGGGGCCAGGCATGTCCACCATGGTGGCTCCACCTCCCCTTATTTAGCACATGCA
CAATAGGAAAGAGATAAGCAATGTGGAGTAGCTCAGGCCAAGGACCTGCCTGCATAATAAAAGG
TTGGGGTGGGGGATGCCAGAGATTCACGCTCTGTGCAGATGGCAACACCTGGTCCTAACTGGTT
TTTTGCTCCCTATGTGTAGATAAGCTACCCCCTTCCCATTAGCTCATTTATAAAAATGCTTGCA
TTTCACTGTGGAATGGGAACTCTTTTCAGGACCTCTCTCTGCAGGAGAGAGCTAGTCTCTTTCT
TTTGCCTATTAAACTTCTGCTCTAGCCTCACACCCTTGGTGTGTCAGCGTCCTTGATTTCCTCA
GCGTGAGACCAAGAACCTCGGGTGCCACCCCAGGCAACAAGGCCATTTCAGTTTGTTCTTTTGT
TATAGGCAATCCATGATCACAGATTTTTCTCTCTTTTTTTTTTTTACACAGTTTAGAGTTTTAG
TTTTACACTTAGGTCTGTAATCCATTTTGTATTAATTCTTATATGTGGCTCAGTGTAGGTGGAA
ATTTGGTTTGTTTTTGCATAAGGATTTCCAATAGTTTTACCACCATTTCTTGAAACTACTATGC
TTTCTCTATTAAACCACATTTGTAACTTTAGTTAAAATCAGTCACATATATCACAGGGCTATTT
CTGACTCTCAATTCTGTTACATTGTCTATTAGTGTATATTGATGTCAGTACTACACTTTTAATT
ACTATTGCTTCAGGGTATGTCTTGTAAACCAAAAATAAAATTATAGGCCCCCCCCGCCCCTGCA
CAACCAACTGAATGGACCCATCCTCTCAGCCAAGGGCATTCCAAAATTAACCTGAAAAACTAGT
TCAAGCCATGATGGGAAGGGGGAGTTGGACATGTCTCATCACACCCTACTACCTTTTGGAATTA
CTGATAGAACAGACTCTTAAAGTCTGAAAAGAAACATTTACAACCTACCCTCTCTGAAGCCTGC
TACCTGGGAGCTTCATCTGCATGATAAAACCTTGGTCTCCACAACCCCTTATGGTAACCCAAAC
ATTCCTTTCTGTTGATAATAACTCTTTCAACTAGTTGCCAATTAGAAAATCTTTAAATCTTCCT
ATGACCTAGAAACCTCCCTACCCCCACTTTGAGTTGTCCTGCCTTTCCTGACAGAACTCATGTA
CATCTTACATATATTGATTGATGCCTCATGTCTCCCTAAAATGTATAAAACAAAGCTGTACCCC
ACCACCTTGGGGACATGTCATCAGGACCTCCTGTGGCTGTGTCATAGGAGCGTCTTTAACTTTG
GCAAAATAAACTTTCTAAATTGATTGAAACCTGTCTTAGCTACTTCTGGTTTACAGTCTTAAAG
TTAGATAATGTAAATTGTCCAGCTTTGGTTTATTTTTGTCCTTAGTAGTTCCATATAAATTTTA
GAATCAGCTTTTCAATTTAATACACTACTTTCCTCTTAGATCCACAATTAAATATATTTGATGC
TAACAATTCTGTTTTATGTTTTTCGTTTTTTTTTTTTGAGACAAGAGTTTCGCTCTTGTTGCCC
AGGCTGGAGTGCAGTGGCGCGATCTTGGCTCACCACAACCTCCACCTCCCAGGTTCAAGCAATT
CTTCTGCCTCAGCCTCCCGAGTAGCTGGGATTACAGGCATGCGCCACCACGCCCGGCTAATTTT
GTATTTTTAGTAGAGACGGGGTTTCACCATGTTGATCAGGCTGGTCTTGAACTCCTGACCTCAG
GTGATCCACCCACCTCGGCCTCCCAAAGTGTTGGGATTACAGGCGTGAACCACCATGCCTGGCC
AGTTCTGTTATTTTTAAAACCCAAGTTTCCCTGGTCATATCTTGGTTGGATGAAGCGTATTTTC
AATAGATTACCCTGGAAAGGCTAGTGAGTACGGTATTCTTCTACATTTTAGACTTTTCTTAGTC
TTGCTACTTCAAGGACAGCTAGGCTGCATATAAAATTCTTGGCTCATACTTTTTCCCCATAAAT
TTCTATGAGAAAGTCTAATGATAACTGATTTTCTTTATTTTGTAACTTAGTCTTTTTGCTTAGA
GGCTCTCTGAGGATGGGAGGGGGTTCTTCCTCCCATCCCTAGGAATTTTTCTTTTTTTTAAATT
CCTAATCACTAGACCACCAGGAAGATTGTTTGTTTTGTTTTGTTTTTATTCTTCAGGGACCCCA
TTTATACATACGTTAAATAAATACTGTTTGCCAATGTATCAACCATTTTGCTTCTTATTTATTT
TTGTTCCTTTGGTTCTTTTTCATGGCTTTGCTTTGGTGCTCCTTAGATTTTCAGTCAGATGTAT
TTGTCCTTGGGTACCTTGTAATCAGTATTACCTTTTCTTCTGTCGCTTTGTTTTCTGTTCGTTT
TGAAATTACTTGTTTCCTGGTCTGGCAATAACAGTTGAGATATGAGGAGTTTGAGCTGCCATCT
GTCTATGTATCTTGCTTTAAGACTGCACTCTTCTATTGATATCACTGGCCTTGATTTTGTGATT
TCTTTATTTCTTCAGGACCACCCTTCATTTTCTACTGTTTGCTTCCTTTTTTTTTGAGATGGAG
TCTCACTCTGTCACTCAGGCTGGAGTGCAGTGATCTTGGCTCATTGCAACCTCTGCCTCCCGGG
TTCCAGCAATTCTCCTGCCTCAGCCTCCCAAGTATCTGGGACTACAGGTGTGCACCACCATGCC
CGGCTAAGTTTTGTATTTTTAATAGAGACGGGGTTTTGCCACATTGGCAGGCTGGTCTCAAACT
CCTGATGTCAAGTGATCCACCCACCCCACCCACCTCTGCATCCCAAAGTGCTGGGATTACAGGA
ATGAGCTGCCGTGCCCAGCCTCCCCCCTACCCCCCTTTTTTTCTTTCGAGACAGAGATTATAGG
TGTGAGCCACTGGACCCAGCCTGTTTTTATTCCTTTTACCAAATCTCCAAGGAATATCTTCCCT
TCCAAGTGCGAATGTAACCTTAAGTCAGTTAACCTCTTTGTGATTACTTTTCTTATCTGCAAAG
TGACTTAATGATCTTAAGTACTTTTTTTTTTTGAGACAGGGTCTCACTGTCACCCTGGCTGGAG
TGCAGTGGCACGATCTCTGATCTCCACTCACTGCAATCTCCTCTTCCCTGGTTCAAGCGGCCCT
CCCACCTTAGCCTTCTGGGTAGCTGGGACTACAGATGTGAACCACCACGCCCAGCTAATTTTTG
TACTTTTTGTAGAGATGGGGTTTTGCCATGTTGCCCAGGCTGGGATTATTAAGTACTTTTTATC
ATACAGCAAGATTGACATTTTATATTGGAATACATTTGTCTCTATATAACGGAGATTAACAGGA
AAATGACAAGCCTGGGTGCGGTGGCTCATGCCTGTAATCCCAGCACTTTGGGAGGCTGAGGTGG
GAGGATCACTTGAGGTCAGGAGTTCGAGACCAGTTTTGCCAAGATGATGAAAGCCCATGTCTAC
TAAAAATACAAAAATTAGCCCAGCTTGATGGTGGGCGCCTATAATCCCAGCTATTTGAGAGACT
GAGGCAGGAGAATCACTTGAACCTGGGCGGCAGAGGTTGCAGTGAGCCGAGATCATGCCACTGC
ACTCCAGCCTGGGTGGCATAGCGAGACTCTTGTCTCAAGAGAAAACAAAACAAAACAAAAAAAA
AACAGGAAAATGACAAAAAGTAATATTACAACTCAGTGAATTTTATAACAAACTTTTTTGGAAT
TCATTGACTAATACTATACCAAATCCAAAATACTCTCTAGTATACCAAATCCAACTCTACCCTA
TAGTATAAATTGGATTCTATTTGGACTTGTCTCACTAATCCCTCATACAGTGTGTTTTATTTTT
TATTGAAGTAAAAAAATTTGTCATTTTAACCATTTTTAAGTATATAGTTCAGTAATATTAAGTA
TGTTCATGTTGTTGCGCAATAGATCTTCGGAAGTTTTTCGTCTTGCAACCTGAAACTCTACCCA
TTAGCAAATTCCCATTTCTCCTTACACTTAGCCCTTGGTAATCATCATTCTTTTTTTTTTTTTT
TTGAGATGGAGTTTTACTCTTGTTGCCCAGGCTGGAGTGCAATGGTGCAATCTCGACTCACCAC
AACCTCCGCCTCCCAGGTTCAAGCAATTCTACCTCAGCCTCCCGAGTAGCTGGGATTACAGTCA
TGCACCACCACGCCCGGCTAATTTTGTATTTTTAGTAGAGAAGGGGTTTCTCCATGTTGAGGCT
GGTCTCGAACTCCTGACCTCAGGTGATCTGCCCACCTCGGCCTCCCAAAGTGCTGGGATTACAG
GCGTGAGCCACTGCGCCTGGCCCATTCTTTCTAATTCTATAAATTTGACTACTTAGTTACCTTA
CATAAATAAATTCTTATAGTTAGTGTTATTTTTGCTTCCATGCCTTTTTTGTTGTTGTTCATGC
TCTTACTTGGAATGCGTTCTATTTTGTCTACCTATGCACATCCTGTTGGGTTTTTTTTTTTTTT
GGGGGTTTTTTTTGTTTTTTTTTGTTTTTTTTTCCCAGACAAGGTCTCAATTTGTTACCCAGGC
TGGAGTGCAGCGGCGCCATCTCCACTCACTGCATCCTCAACTTCCTGGGCCCAGGTGATCCTCT
CGCCTCAGCCCCTGCAGGTAGCTGGGACTATAGGCATGTGCCACCATGCCCAGCTAAATTTGGT
TTTTTTGTTTGTTTGTTTTTGAGACAGAGTCTCACTCTGTCACCCAGGCTGGAGTGCAGTGGCA
CAATCTCAGCTCACTGCAATCTCTGCCGCCCGGGTTCAAGTGATTCTCCTGCCTCAGCCTCCCA
AGCAGCTGGGATTACAGGTGACTGCCACCACGCCAGCTAAGTTTTGTAGTTTTAGTAGAGATGG
GGTTTCACCTTGTTGGCCATGCTGGTCTCGAACTCCTGACCTCGTGATCTGCCTGCTTCTGCCT
CCCAAAGTGCTGGAATTACAGGCATGAGCCACCACGCCCGGCCAGAATTTTTGTATTTTTAGTA
GACACAAGGTTCTTACCCTGTTGCCTAGGCTGGTCTGGAAGTCCTGGACTCAAGCAATTCACCT
GCCTTGGCCTCCCAAAATGCTGGGATTACAAGCCACCATGCCCGGCCTAAATCCTGTTGTTTTG
TTTTGTTTTATTTTGTTTTGTTTTGTTTTGTTTGTTTTTTGAGACAGAGTCTCGCTATGTCTCT
CAGGCTGTAGTGCAGTGGCGCGATCTTGGCTCACTGCCACCTCTGCCTCCCAGGTTCAAGTGAT
TCTCCTGCCTCAGCCTCCCAAGTAGCTGGGATTACAGGCATGTGCTACTATGTCCGGCTAATTT
TTGTATTTTTAGTAGAGACAGGGTTTCACCATGTTGGCCAGGCTGGTCTCGAACTCCTGACCTC
GTGATCCACCCACCTCGGCCACCCAAAGTGCTGGGATTACAGGCGTGAGTGGTTTTTATTTCTT
AGGCCGGTTTCCTCCATATGATCTTGCAGTAGACATTAATTTCTTTCCTTTTTAATTAAAATAC
TGTTTGTATTTCACATTTTGATGTTTGTTAAGATTTGTTTTATATTGTTTTTTGTTTTGTCTTG
TGTGATAGTCTTAAATCCCTAGTTAGATAATAACTGGAGAGTACCATGTTTCTATATATCTCTC
AGTGACTTGCACAGTGCTAGCAGATAGTGCTAAAAAATTATTTATTATTATTATTATTTTGTTA
TTGTTGTTGTTGTTGTTAGACAGGGTCTTCCTCTGTCACCCAGGCTAGAGGGCAATGGGATGAT
CATAGCTTACTGCAGCCTCCAACAACTGGGCTCATGTAATTCTCCTGCCTCAGCTTCCCAAGTA
GCTGGGATTACAGGCATGAGCCACCATGTCTGGACAAAAATATTTCCAGGTGCAGTGGCTCATG
CCTGTAATTCCCACACTTGGGAGGCCGAGCGAGGCTGGAGGATCACTTGAGCCTAGGAGTTCAA
GACCAGCTTGGCTAAGATGGCGAGACCCCGTCCCTACAAAAAATTTTAAAAACTAGCCAGGCAT
GGTGGCATGCACCTATATTCCCAACTACTCAGTGGGCTGAGGTGGGAGGGTCATTTGAACACAG
GAATTTGAGGGGAGAAAAAAAGAAGAGAGAAAGAGAAGTGAAGGAAGGAAGAAAGGAAGGAGGG
AGGGAGAGAAGAAAGAAACGAAAGAAAGGAAAAGAAAAGGAAGGAAAGAAAATTGGTACCAGGA
AAGCAGGAAAGGGAAATGGAAGTAAAAAAATAATAATAATAATAAAATGAAAATTGGTTAGTCA
CTATTAACAATTTGTATCCTTATAATCTGGAAACATTATAATTTCAAAAGAAAAAATATTCTTT
GGATCATAGGTTCTGAGGTCAGAACAGCATTCCCGTAGTCTAGATGAAGTCAAGTTTTATCTGA
TCTTAATTGAAATAAATATAGCTGGCCTTGAACAAATCTACTCATGGTATGTGGATAGGAATTA
AATTGTAGGGGCATTCACTTGATGGCATTCATTCTTAGAACATTTACCTATGTCTAGCTTTTGG
AGTAAAGTCACATAACCTCTAACCAGGTAAGTTTCCTGTGGCTTTATTTAGGATTTTAAATACT
CATTTTCAGTGTAATTTTGTTATGTGTGGATTAAGATGACTCTTGGTACTAACATACATTTTCT
GATTAAACCTATCTGAACATGAGTTGTTTTTATTTCTTACCCTTTCCAGAGCGATGATTCTGAC
ATTTGGGATGATACAGCACTGATAAAAGCATATGATAAAGCTGTGGCTTCATTTAAGGTATGAA
ATGCTTGCTTAGTCGTTTTCTTATTTTCTCGTTATTCATTTGGAAAGGAATTGATAACATACGA
TAAAGTGTTAAAGTACATGTTATTCAGTTTTCATTTTGAAGATTAGATGGTAGTATGAGTTAGT
TAAATCAGGTGATATCCTCCTTTAGAAGTTGATAGCCTATATATGTCATCCTTTGTGGAGGCAA
TTTAAATAAAATTTAAAACATTTATTCCTGGCTGGGTATGGTGGCTCACTCCTGTAATCCCAGC
ACTTTGAGAGGCTGAGGCGGGTGGATCACCTGAGGTCAGGAGTTTGAGACCAGCCTGGCCAACA
TGGTGAAACCCCGTCTTTACTAAAAATACAAAAATTAGCCAAGCATGGTGGCACGTGCCTGTAA
TCCCAGCTGCTTGGGACACTGAGGCAGGAGAATTGCTTGAACCTGGGGGGCAGAGGTTGCAATG
ATTGCACCACTGCACTCCAGCCTGGGCGATAGAGTGAGACTCCATCTCAGAAAACGAACAAACA
ATGTATTCCTTTTAGTATTTTTACATTGTATCAAACTATGGAAGTCCTCTAATTGAGATTAATA
AGAAAAAGACAATCTGAATTATAATTTTAAACATTTAACAAGCATGTAGTAAAATAATGATGAA
GATAAATAGCATTAGTACAGCAATTAATATTTGTAGCATGCTGACAGTGCTCTGTGTGCGTTTC
ATATATTAAATTACTCTAATCATCCCAAATCCTGTAAGTTGGGTATCAATTCAAGTGTTCCTAT
TGGGTAGGAATATACAGTTCTTTTAGGAAATGTAGTATGGTTCTGTGTCTCAAACAGGACACTT
ACACAGTTGGCCAACATCATCACCTTCTCCATTCTCTGAGATGTTTAGTCTTACTGAGCACTAA
ATATGGGTCATCAATAGTCCAGACTACCTTGAGCAAACAATAGTCCAGACTACCTTGAGCAAAC
AGAGCATATACTCATACAGTGTATAAAGAGCACCAAGCATACAGATTTCATGTCTTTCTCATAG
TTACTCTTGTAACATGAGCTAAAGATCAGACCTCTATGTCACCTTTGTAACTGATTTCTAGATT
TTTTTTTTTTTTTGAGATGGGGTCTTGCCCTGTCACCCAGGCTGGAGTGTAGTGGCGTGATCAT
GCCTCATTGGAGCCTTCAACTCATGAGCTCAAACAATCCTCCTACCTCAGCTTCCTGAGTAGTT
GGGACCACAGGTGTGTGCCACCACACCCAGCTCATTTTTGTATTCTTTGTAGAGATGCAGTCTC
ACCCTGTTGCCCACGCTGGCCTGGAACTCCTGAGCTCAAAAGATCCCTCCGCCTTGACCTTCCA
AAGTGCTGGGATTACAAGCATGAACCACTGCACCCGGCCTAGATTTTTAAATGTGCTTTCCAGT
ATACACTGAAACTAGAAGTCGACTAAAGAATTACCAAGAGAATTCTATAAAATAGAGATTGAAA
TGGGGCTCGATGTGGGATGGGTTGGTGATATTGCAGGGAGAAGTAATCTGAGTAAAGGAGGAAA
AGAACTGATTTGGGAAAACGATAGTTTTAGTAGTGAGTTTGAGTATGAATTAAGTTGAGATTGA
ATTTGAATTAAGTTGAGGTTGAATATGAATTAAGTTGAGGTTGAGTTTGAGGTATGAATTAAGA
TGTGAAATTGATCATTGGAAATGTTAGATTGAGAAAAGTCACAGCTGGATTAATAGCTTCAGAA
GTGTGTTTGCAGACAGTTGCAACTAAAGTAATAAGAATAGATGGCCTTGGCCGGGCGCGGTGGC
TCACGCCTGTAATCCCAGTACTTTGGGAGGCTGAGGCGAGCAAATCACGAGGTCAGGAGTTCAA
GACCAGCCTGGCCCACATGGTGAAACCCCGTCTTTATTAAAAATACAAAAATTAGCTGTGCACA
GTGGTGCACGCCTGTAATCCCAGCTACTCGGGAGGCTGAGACAGGAGAATCGCTTGAACCTGGG
AGGTGGAGGTTGCAGTGAGCTGAGATCAGTGTGACTGCACTCCAGCCCGGTGACAGAGTGAGAC
TCTGTGTAAAAAAATAAAATAAATAAAATAATGGCCGTAAGCAAGTAAAGAAGGATGGCCAGCT
CTTATTGGGAATGCCTAAATCTAAGGCTTGATCAGAAGTAATGAAACCGTTGGGGCCCTACATT
GCTATGACATCCAAAGGGCCATGAATATCAGGAAGAAAGATAATTAACAGGGTCTAATGTTACA
GAGAGGTTGAGAGCAAGGAGATTTGATTAAAAGGGTCTTTAGAGCTGATGTCAGGTGTATGATG
CCTTTAAGAGCAGTTTTTATAGTGCAGGGGGTGGTCAAAAGAGAAAATAGGTGCTTTCTGAGGT
GACGGAGCCTTGAGACTAGCTTATAGTAGTAACTGGGTTATGTCGTGACTTTTATTCTGTGCAC
CACCCTGTAACATGTACATTTTTATTCCTATTTTCGTAGCATGCTCTAAAGAATGGTGACATTT
GTGAAACTTCGGGTAAACCAAAAACCACACCTAAAAGAAAACCTGCTAAGAAGAATAAAAGCCA
AAAGAAGAATACTGCAGCTTCCTTACAACAGGTTATTTTAAAATGTTGAGATTTAACTTCAAAG
GATGTCTCATTAGTCCTTATTTAATAGTGTAAAATGTCTTTAACTTAAGTGATTAGTACAGTGT
TTCTATTGACATATACTTATACAACTTCAAAAACAACTATTAAATTTTCTGTTATTTAGGAACA
TGCATATTAGTCATGAAAGTATAAAGAATTAGATGGGAATGATAAATGCTAAAATCAGGACATG
TGTTCCATTTGTGAATGGAAGGCAGGGAGAAGGTGCCGTTTGGAAGGAGTACCCAAGAGCCGTA
AGCTGAATTGGCAGTGTTTTACATCTTAAGCTGAGAGATAGATTTTTTTTTCCCCTTTTTCTTT
AAAAACTCTAAAACTGTTAATTCCAAGGAACCCAGAAGTCTAGGTAGATTATTTCTGCTAGTTA
AAAGCAGTAGTCCTGAAAGCTGAATATTTTGGTGTCTTTTGAGCCAACTTTAGTTTCATCATTA
CCAAGGGGGAAGAGAGCTAACAGTTGATGAGCACTTGCTCTAGGCCAGTCCAGAGTGCTGGGCA
CCATACGCATTTTATCTCCCTCCCGCTATTCACAACAAATATGGGAGGTAGTTTATATTATAGC
CATCTAATAAGATGGGGAAACTAAGACTCAAAGAGATTCAGAAACTTGTCCATGATTATAAATG
TAAGAGAGTTGGAATTCAGATTTATGTATTTAGACCCCAAGCCTTTCTCATTACATCATTTTGC
CTTCCAAATCTCTACCCTCTATCCTTCACCTCCCCACTGATCAAAACGAGATGATAGTTTGCCC
TCTTCAAAAGAAATGTGTGCATGTATATATCTTTGATTTCTTTTGTAGTGGAAAGTTGGGGACA
AATGTTCTGCCATTTGGTCAGAAGACGGTTGCATTTACCCAGCTACCATTGCTTCAATTGATTT
TAAGAGAGAAACCTGTGTTGTGGTTTACACTGGATATGGAAATAGAGAGGAGCAAAATCTGTCC
GATCTACTTTCCCCAATCTGTGAAGTAGCTAATAATATAGAACAAAATGCTCAAGAGGTAAGGA
TACAAAAAAAAAAAAATTCAATTTCTGGAAGCAGAGACTAGATGAGAAACTGTTAAACAGTATA
CACAGTTGTCAGTTTGATCCACCGAGGCATTAATTTTTTCTTAATCACACCCTTATAACAAAAA
CCTGCATATTTTTTCTTTTTAAAGAATGAAAATGAAAGCCAAGTTTCAACAGATGAAAGTGAGA
ACTCCAGGTCTCCTGGAAATAAATCAGATAACATCAAGCCCAAATCTGCTCCATGGAACTCTTT
TCTCCCTCCACCACCCCCCATGCCAGGGCCAAGACTGGGACCAGGAAAGGTAAACCTTCTATGA
AAGTTTTCCAGAAAATAGTTAATGTCGGGACATTTAACCTCTCTGTTAACTAATTTGTAGCTCT
CCCATGAAACTTTTGTAGCTTAAATACACAAGAATTTTTTGAAAAGGAAATAAGATAATGATGC
AAAATAGTTAATTTTTTAAAAAAATGTTAGACACTGCAGTGGATGCAACAAAATACTTTATATG
AAAGATTTATCCAGTTAACTTTTGTGGAGTATTAGGTATTAGACTAATAATTAGCACACTTACT
TAAGTTAGAAAGTATAATAATGCGCCGGACGCGGTAGCTCACGCCTGTAATCCCAGCACTTTGG
GAGGCCAAGGTGGGCGGATCACAAGGTCAGGAGATCGAGACCATCCTGGCTAACACGGTGAAAC
CCCATCTCTACTGAAAATACAAAAAAATTTGCCGGGCGTGATGGCGGGCACCTGTAGTCCCAGC
TACTCGGGAGGCTGAGGCAGGAGGATGGTGTGAACCCCGGAGGCAGAGCTTGCAGTGAGTCAAG
ATCGTGCCACTGCACTCCAACCTGGGCGACAGAATGAGACTCCATCTCAAACAAAAAAACAAAA
CAAAACAAAAAAAAGTGTAATAATAATTTATCATTAGCTGGATGATATGCTGTTGTTTCCCATG
TCACCTGTATAAGATATGTAAAATAAGAACACATTATTTACATCTAATATAGATAAAATCCTGA
GGCGCTCTCAGATTGTTTTGTAGAGTTCAAATGTAAATATTGTTTTCATTTATGGTCCTTTTGG
TTATAAGTAACAGAAATCAACTCTAAAAAGATTTTTATTATAGGTTAGATTATGTCATGGAACC
TTAAGGCTTGTCCCTTTCTAGTTCTTTTGTGTAAAGCGGTGATTTCTTCCATGGAGGGAATGGT
ATTTAGGCAATTTTTTTTTTTTTTCGAGATGGAGTCTTGCTCTGTCGCTCAGGCTGGAGTGCAG
TGGCACCATTTCAGCTCACTGCAACTTCCACCTCCTGGGTTCAAGTGATTCTCCTGCTTCAGCC
TCCCAAGTAGCTGAGATTACAGGCACCCGCCACCACACCCGGCTTATTTTGTATTTTTAGTAGA
GATGGGGTTTCACCATGTTGGCCAGGCTGGTCTTGAACTCCTGACCTCAAGTGATCTCCCCACC
TTGGCCTTCCAAAGTGCTAGGATTACAGGCGCCTAGCCTAGGCAGTCATTTTCAAAAAACAAGC
ATGACTCACCAAAAGTTTTAAGATTTTCTGTGATAATGTTCTTATTGAGGCTTACATTATATTA
CAGTTTCTTGAATCTAAAATGATGTACCCTCTTAGGATATATACATCATGCTTCATTGGTCTCA
GGGGGCTGATTTTTATAAGGAGAGATTTGCTAGTTTTCACAATATGTCCTCTAAGTTGGCATGT
ATAGCTAAACAGGCTTTCATAAAAATATACAATTTAGTTAATGAAATTTGGGATATAGTCTTTT
ATGATTGAAATAATTTTGCTAAATAGACTGTCTCTGATTTATTAGGTAATCACCACTCTTATTT
TGTTTTACTTCCTTAATGTCTACATAGAAAGGAAATGAGAAAAATCCAGAGGTTGTCATTTGAC
TTATGAGTCTGTTTGACTTCAGGATTTGGTACATGAAATTTCACTTAATCTTTTTGATATGTAT
AAAACAAATATTCTGGGTAATTATTTTTATCCTTTTGGTTTTGAGTCCTTTTTATTCCTATCAT
ATTGAAATTGGTAAGTTAATTTTCCTTTGAAATATTCCTTATAGCCAGGTCTAAAATTCAATGG
CCCACCACCGCCACCGCCACCACCACCACCCCACTTACTATCATGCTGGCTGCCTCCATTTCCT
TCTGGACCACCAGTAAGTAAAAAAGAGTATAGGTTAGATTTTGCTTTCACATACAATTTGATAA
TTAGCAGAATAGAGGATTGTAAAATGTCATTGTAGAACATCCCTTGGGCCAGATTCTAATGGGT
AGAAATTTGAACTAAACCTCTGGGTTTTGTTTGTTTTTAATGCCTTTCTGTTACCCAGATGCAG
TGCTCTTGTAGTCCCAAGTCTAAGCTCTAGGTTGCCTTCTTTCCTGGCAGAAGTTGGTGTCTAT
GCCATAAGGAGGTAGTTCCTGTTAGAAGGGATTTAATTATACCTTATATAAGGAATTAGTGTTT
GCCCTTCTAGGTATAGTTGGATGTTAGCTTCTGATGTAAACTGGATTTCTTTTTCTTTCTCTCT
CTTTTTTTTTTTTTGTTTTGGAGGCAGAGTTTTGCCCTTGTACCCCAGGCTGGAGTGCAGTGGT
GTGATCTCAGCTCACAGCAACCTCCGCCTCCTGGGTTCAAGCAATTCTGCCTCGGCCTCCCAAG
TAGCTGGGATTACAGGCGACTGCCACCACACCCGGCTAATTTTTGTTTTATTAGTAGAGATGGG
GTTTCACCATGTTGGCCAGACTGATCTTGAACTCCTGACCTCAGGTGATCCACCCGCCTTGGCC
TCCCAAAGCGCTGGGATTACAGGCGTGAGCTGCCGCACCCAGCTGTAAACTGGATTTCTAATGG
TAGATTTTTAGGTATTAACAATAGATAAAAAGATACTTTTTGGCATACTGTGTATTGGGATGGG
GTTAGAACAGGTGTTCTACCCAAGACATTTACTTAAAATCGCCCTCGAAATGCTATGTGAGCTG
TGTGTGTGTGTGTGTGTGTGTGTGTGTATTAAGGAAAAGCATGAAAGTATTTATGCTTGATTTT
TTTTTTTTACTCATAGCTTCATAGTGGAACAGATACATAGTCTAAATCAAAATGTTTAAACTTT
TTATGTCACTTGCTGTCTTTTCGTCCTCGTTAAATTTAATTTTGTTGGTCTTTTGTTGTTATTG
GTTGGTTTTCTCCAAATGCTAGCTATGTTAAGAAATTTAAGGCCAGGTACAGTGGCTCATGCCT
GTAATCCCGGCATTTTAGAAGGCTGAGGCAGGAGGATCACTTGAGCTCAGGAGTTTGAGACCAG
TCTGGGCAACATAGCAAGACCTCGTCTTTGTTTAGGGGAAAAAAAAGAAATTTAAGTAGGAGAT
TATATAAGCAAAAATACAATTAATTTCCAGCATTCACTATATAATATAAATCTCCAGACTTTAC
TTTTTTGTTTACTGGATATAAACAATATCTTTTTCTGTCTCCAGATAATTCCCCCACCACCTCC
CATATGTCCAGATTCTCTTGATGATGCTGATGCTTTGGGAAGTATGTTAATTTCATGGTACATG
AGTGGCTATCATACTGGCTATTATATGGTAAGTAATCACTCAGCATCTTTTCCTGACAATTTTT
TTGTAGTTATGTGACTTTGTTTTGTAAATTTATAAAATACTACTTGCTTCTCTCTTTATATTAC
TAAAAAATAAAAATAAAAAAATACAACTGTCTGAGGCTTAAATTACTCTTGCATTGTCCCTAAG
TATAATTTTAGTTAATTTTAAAAAGCTTTCATGCTATTGTTAGATTATTTTGATTATACACTTT
TGAATTGAAATTATACTTTTTCTAAATAATGTTTTAATCTCTGATTTGAAATTGATTGTAGGGA
ATGGAAAAGATGGGATAATTTTTCATAAATGAAAAATGAAATTCTTTTTTTTTTTTTTTTTTTT
TTGAGACGGAGTCTTGCTCTGTTGCCCAGGCTGGAGTGCAATGGCGTGATCTTGGCTCACAGCA
AGCTCTGCCTTCTGGATTCACGCCATTCTCCTGCCTCAGCCTCAGAGGTAGCTGGGACTACAGG
TGCCTGCCACCACGCCTGTCTAATTTTTTGTATTTTTTTGTAAAGACAGGGTTTCACTGTGTTA
GCCAGGATGGTCTCAATCTCCTGACCCCGTGATCCACCCGCCTCGGCCTTCCAAGAGAAATGAA
ATTTTTTTAATGCACAAAGATCTGGGGTAATGTGTACCACATTGAACCTTGGGGAGTATGGCTT
CAAACTTGTCACTTTATACGTTAGTCTCCTACGGACATGTTCTATTGTATTTTAGTCAGAACAT
TTAAAATTATTTTATTTTATTTTATTTTTTTTTTTTTTTTGAGACGGAGTCTCGCTCTGTCACC
CAGGCTGGAGTACAGTGGCGCAGTCTCGGCTCACTGCAAGCTCCGCCTCCCGGGTTCACGCCAT
TCTCCTGCCTCAGCCTCTCCGAGTAGCTGGGACTACAGGCGCCCGCCACCACGCCCGGCTAATT
TTTTTTTATTTTTAGTAGAGACGGGGTTTCACCGTGGTCTCAATCTCCTGACCTCGTGATCCAC
CCGCCTCGGCCTCCCAAAGTGCTGGGATTACAAGCGTGAGCCACCGCGCCCGGCCTAAAATTAT
TTTTAAAAGTAAGCTCTTGTGCCCTGCTAAAATTATGATGTGATATTGTAGGCACTTGTATTTT
TAGTAAATTAATATAGAAGAAACAACTGACTTAAAGGTGTATGTTTTTAAATGTATCATCTGTG
TGTGCCCCCATTAATATTCTTATTTAAAAGTTAAGGCCAGACATGGTGGCTTACAACTGTAATC
CCAACAGTTTGTGAGGCCGAGGCAGGCAGATCACTTGAGGTCAGGAGTTTGAGACCAGCCTGGC
CAACATGATGAAACCTTGTCTCTACTAAAAATACCAAAAAAAATTTAGCCAGGCATGGTGGCAC
ATGCCTGTAATCCGAGCTACTTGGGAGGCTGTGGCAGGAAAATTGCTTTAATCTGGGAGGCAGA
GGTTGCAGTGAGTTGAGATTGTGCCACTGCACTCCACCCTTGGTGACAGAGTGAGATTCCATCT
CAAAAAAAGAAAAAGGCCTGGCACGGTGGCTCACACCTATAATCCCAGTACTTTGGGAGGTAGA
GGCAGGTGGATCACTTGAGGTTAGGAGTTCAGGACCAGCCTGGCCAACATGGTGACTACTCCAT
TTCTACTAAATACACAAAACTTAGCCCAGTGGCGGGCAGTTGTAATCCCAGCTACTTGAGAGGT
TGAGGCAGGAGAATCACTTGAACCTGGGAGGCAGAGGTTGCAGTGAGCCGAGATCACACCGCTG
CACTCTAGCCTGGCCAACAGAGTGAGAATTTGCGGAGGGAAAAAAAAGTCACGCTTCAGTTGTT
GTAGTATAACCTTGGTATATTGTATGTATCATGAATTCCTCATTTTAATGACCAAAAAGTAATA
AATCAACAGCTTGTAATTTGTTTTGAGATCAGTTATCTGACTGTAACACTGTAGGCTTTTGTGT
TTTTTAAATTATGAAATATTTGAAAAAAATACATAATGTATATATAAAGTATTGGTATAATTTA
TGTTCTAAATAACTTTCTTGAGAAATAATTCACATGGTGTGCAGTTTACCTTTGAAAGTATACA
AGTTGGCTGGGCACAATGGCTCACGCCTGTAATCCCAGCACTTTGGGAGGCCAAGGCAGGTGGA
TCACGAGGTCAGGAGATCGAGACCATCCTGGCTAACATGGTGAAACCCCGTCTCTACTAAAAGT
ACAAAAACAAATTAGCCGGGCATGTTGGCGGGCACCTTTTGTCCCAGCTGCTCGGGAGGCTGAG
GCAGGAGAGTGGCGTGAACCCAGGAGGTGGAGCTTGCAGTGAGCCGAGATTGTGCCAGTGCACT
CCAGCCTGGGCGACAGAGCGAGACTCTGTCTCAAAAAATAAAATAAAAAAGAAAGTATACAAGT
CAGTGGTTTTGGTTTTCAGTTATGCAACCATCACTACAATTTAAGAACATTTTCATCACCCCAA
AAAGAAACCCTGTTACCTTCATTTTCCCCAGCCCTAGGCAGTCAGTACACTTTCTGTCTCTATG
AATTTGTCTATTTTAGATATTATATATAAACGGAATTATACGATATGTGGTCTTTTGTGTCTGG
CTTCTTTCACTTAGCATGCTATTTTCAAGATTCATCCATGCTGTAGAATGCACCAGTACTGCAT
TCCTTCTTATTGCTGAATATTCTGTTGTTTGGTTATATCACATTTTATCCATTCATCAGTTCAT
GGACATTTAGGTTGTTTTTATTTTTGGGCTATAATGAATAATGTTGCTATGAACATTCGTTTGT
GTTCTTTTTGTTTTTTTGGTTTTTTGGGTTTTTTTTGTTTTGTTTTTGTTTTTGAGACAGTCTT
GCTCTGTCTCCTAAGCTGGAGTGCAGTGGCATGATCTTGGCTTACTGCAAGCTCTGCCTCCCGG
GTTCACACCATTCTCCTGCCTCAGCCCGACAAGTAGCTGGGACTACAGGCGTGTGCCACCATGC
ACGGCTAATTTTTTGTATTTTTAGTAGAGATGGGGTTTCACCGTGTTAGCCAGGATGGTCTCGA
TCTCCTGACCTCGTGATCTGCCTGCCTAGGCCTCCCAAAGTGCTGGGATTACAGGCGTGAGCCA
CTGCACCTGGCCTTAAGTGTTTTTAATACGTCATTGCCTTAAGCTAACAATTCTTAACCTTTGT
TCTACTGAAGCCACGTGGTTGAGATAGGCTCTGAGTCTAGCTTTTAACCTCTATCTTTTTGTCT
TAGAAATCTAAGCAGAATGCAAATGACTAAGAATAATGTTGTTGAAATAACATAAAATAGGTTA
TAACTTTGATACTCATTAGTAACAAATCTTTCAATACATCTTACGGTCTGTTAGGTGTAGATTA
GTAATGAAGTGGGAAGCCACTGCAAGCTAGTATACATGTAGGGAAAGATAGAAAGCATTGAAGC
CAGAAGAGAGACAGAGGACATTTGGGCTAGATCTGACAAGAAAAACAAATGTTTTAGTATTAAT
TTTTGACTTTAAATTTTTTTTTTATTTAGTGAATACTGGTGTTTAATGGTCTCATTTTAATAAG
TATGACACAGGTAGTTTAAGGTCATATATTTTATTTGATGAAAATAAGGTATAGGCCGGGCACG
GTGGCTCACACCTGTAATCCCAGCACTTTGGGAGGCCGAGGCAGGCGGATCACCTGAGGTCGGG
AGTTAGAGACTAGCCTCAACATGGAGAAACCCCGTCTCTACTAAAAAAAATACAAAATTAGGCG
GGCGTGGTGGTGCATGCCTGTAATCCCAGCTACTCAGGAGGCTGAGGCAGGAGAATTGCTTGAA
CCTGGGAGGTGGAGGTTGCGGTGAGCCGAGATCACCTCATTGCACTCCAGCCTGGGCAATAAGA
GCAAAACTCCATCTCAAAAAAAAAAAAATAAGGTATAAGCGGGCTCAGGAACATCATTGGACAT
ACTGAAAGAAGAAAAATCAGCTGGGCGCAGTGGCTCACGCCGGTAATCCCAACACTTTGGGAGG
CCAAGGCGGGTGAATCACCTGAAGTCGGGAGTTCCAGATCAGCCTGACCAACATGGAGAAACCC
TGTCTCTACTAAAAATACAAAACTAGCCGGGCATGGTGGCGCATGCCTGTAATCCCAGCTACTT
GGGAGGCTGAGGCAGGAGAGTTGCTTGAACTGAGAAGGCGGAGGTTGCGGTGAGCCAAGATTGC
ACCATTGCACTCCAGCCTGGGCAACAAGAGCGAAACTCCGTCTCAAAAAAAAAAGGAAGAAAAA
TATTTTTTTAAATTAATTAGTTTATTTATTTTTTAAGATGGAGTTTTGCCCTGTCGCCCAGGCT
GGGGTGCAATGGTGCAATCTCGGCTCACTGCAACCTCCGCCTCCTGGGTTCAAGTGATTCTCCT
GCCTCAGCTTCCCGAGTAGCTGTGATTACAGCCATATGCCACCACGCCCAGCCAGTTTTGTGTT
TTGTTTTGTTTTTTGTTTTTTTTTTTTGAGAGGGTGTCTTGCTCTGTCCCCCAAGCTGGAGTGC
AGCGGCGCGATCTTGGCTCACTGCAAGCTCTGCCTCCCAGGTTCACACCATTCTCTTGCCTCAG
CCTCCCGAGTAGCTGGGACTACAGGTGCCCGCCACCACACCCGGCTAATTTTTTTGTGTTTTTA
GTAGAGATGGGGTTTCACTGTGTTAGCCAGGATGGTCTCGATCTCCTGACCTTTTGATCCACCC
GCCTCAGCCTCCCCAAGTGCTGGGATTATAGGCGTGAGCCACTGTGCCCGGCCTAGTCTTGTAT
TTTTAGTAGAGTCGGGGTTTCTCCATGTTGGTCAGGCTGTTCTCCAAATCCGACCTCAGGTGAT
CCGCCCGCCTTGGCCTCCAAAAGTGCAAGGCATTACAGGCATGAGCCACTGTGACCGGCAATGT
TTTTAAATTTTTTAAATTTAAATTTTATTTTTTAGAGACCAGGTCTCACTCTATTGCTCAGGCT
GGAGTGCAAGGGCACATTCACAGCTCACTGCAGCCTTGACCTCCAGGGCTCAAGCAGTCCTCTC
ACCTCAGTTTCCCGAGTAGCTGGGACTACAGTGATAATGCCACTGCACCTGGCTAATTTTTATT
TTTATTTATTTATTTTTTTTTGAGACAGAGTCTTGCTCTGTCACCCAGGCTGGAGTGCAGTGGT
GTAAATCTCAGCTCACTGCAGCCTCCGCCTCCTGGGTTCAAGTGATTCTCCTGCCTCAGCCTCC
CAAGTAGCTGGGATTAGAGGTCCCCACCACCATGCCTGGCTAATTTTTTGTACTTTCAGTAGAA
ATGGGGTTTTGCCATGTTGGCCAGGCTGTTCTCGAACTCCTGAGCTCAGGTGATCCAACTGTCT
CGGCCTCCCAAAGTGCTGGGATTACAGGCGTGAGCCACTGTGCCTAGCCTGAGCCACCACGCCG
GCCTAATTTTTAAATTTTTTGTAGAGACAGGGTCTCATTATGTTGCCCAGGGTGGTGTCAAGCT
CCAGGTCTCAAGTGATCCCCCTACCTCCGCCTCCCAAAGTTGTGGGATTGTAGGCATGAGCCAC
TGCAAGAAAACCTTAACTGCAGCCTAATAATTGTTTTCTTTGGGATAACTTTTAAAGTACATTA
AAAGACTATCAACTTAATTTCTGATCATATTTTGTTGAATAAAATAAGTAAAATGTCTTGTGAA
ACAAAATGCTTTTTAACATCCATATAAAGCTATCTATATATAGCTATCTATGTCTATATAGCTA
TTTTTTTTAACTTCCTTTATTTTCCTTACAGGGTTTCAGACAAAATCAAAAAGAAGGAAGGTGC
TCACATTCCTTAAATTAAGGAGTAAGTCTGCCAGCATTATGAAAGTGAATCTTACTTTTGTAAA
ACTTTATGGTTTGTGGAAAACAAATGTTTTTGAACATTTAAAAAGTTCAGATGTTAAAAAGTTG
AAAGGTTAATGTAAAACAATCAATATTAAAGAATTTTGATGCCAAAACTATTAGATAAAAGGTT
AATCTACATCCCTACTAGAATTCTCATACTTAACTGGTTGGTTATGTGGAAGAAACATACTTTC
ACAATAAAGAGCTTTAGGATATGATGCCATTTTATATCACTAGTAGGCAGACCAGCAGACTTTT
TTTTATTGTGATATGGGATAACCTAGGCATACTGCACTGTACACTCTGACATATGAAGTGCTCT
AGTCAAGTTTAACTGGTGTCCACAGAGGACATGGTTTAACTGGAATTCGTCAAGCCTCTGGTTC
TAATTTCTCATTTGCAGGAAATGCTGGCATAGAGCAGCACTAAATGACACCACTAAAGAAACGA
TCAGACAGATCTGGAATGTGAAGCGTTATAGAAGATAACTGGCCTCATTTCTTCAAAATATCAA
GTGTTGGGAAAGAAAAAAGGAAGTGGAATGGGTAACTCTTCTTGATTAAAAGTTATGTAATAAC
CAAATGCAATGTGAAATATTTTACTGGACTCTATTTTGAAAAACCATCTGTAAAAGACTGGGGT
GGGGGTGGGAGGCCAGCACGGTGGTGAGGCAGTTGAGAAAATTTGAATGTGGATTAGATTTTGA
ATGATATTGGATAATTATTGGTAATTTTATGAGCTGTGAGAAGGGTGTTGTAGTTTATAAAAGA
CTGTCTTAATTTGCATACTTAAGCATTTAGGAATGAAGTGTTAGAGTGTCTTAAAATGTTTCAA
ATGGTTTAACAAAATGTATGTGAGGCGTATGTGGCAAAATGTTACAGAATCTAACTGGTGGACA
TGGCTGTTCATTGTACTGTTTTTTTCTATCTTCTATATGTTTAAAAGTATATAATAAAAATATT
TAATTTTTTTTTAAATTAGCTGTATCTGTGATTGTATTTCTTTTTTGCATATTATTTTGCCCTT
TGGCCCATATTTTGATATGGATGCCACCATAGCATTTTGTGTATGTGCATGTGTATTCCCACTT
AATGTCACATTTTTCATGTCTTTACATATTCTTATTTTTGTTTGTTTTTGAGACAGAGTCTCGC
TCTGCTGCCCACGCTGGAGTGCAGTGGTGCAATCTCAGCTCACTGCAACCTGTGCTATCCGGGT
TCAAGCGGTTCTCGTGCCTCAGCCACGTGAGTAGTTGGGATTACAGGCATGTGGCACCATGCCC
CACTAAGTTTTGTATTTTTAGTAGAGATGGAGTTTCACCATGTTGGCCAGGCTGGTCTCAAACT
CCTGCCCTCAAGTGATTCGACCACCCTGGCCTCCCAAAGTGCTGGGATTACAGCCGTGAGCCAC
CGCACACGGCCTCTCTATTTATTTCTATACATAGCTTTTCACATTATATTATGTTTATATATTG
TTTATATCTGTATTTCCTCTTTCATTAGAGAAAAGGTAGTACATCTTATTCTTCATGGTGTCTA
CAATATCTGGCAGTTTTTGGAAGTCAAGCGTGAGCTTAGAGCATAGACTGGTGGGATTGTCAAA
GAAGAGGGCAACTGGAAGAGAACTGTCAGTTATTTTTGGATCAGTCTTTAATTCATCATGACGG
GTTAGGCATTAGTTGTATTTCTTGCTAATTTTGAAGAAGACTTATTAACAAATCCTACATTAGG
TAAATGGTTTTGAAAGTTGAGTTAATCATAATGGTGTTTGACCTAGGACTATTTTTAGGCCCTA
TTTATCTTAATATCGAATAATGAAGCAGCTTCCCCCTTAGATATAGACAGAAAACATCAAAGCC
ACCACACTACCTGGCTGGATTTATCCTAGTAATAAAATCAAAACTGAGC.

TABLE 1
SMN1 and SMN2 splice junctions

| Exon | | 3′3′SJ | | 5′ SJ |
|---|---|---|---|---|
| No. | 3′ Splice Junction | SEQ ID | 5′ Splice Junction | SEQ ID |
| | (3′3′SJ) | NO | (5′SJ) | NO |
| 1 | — | — | CAG/gtgaggtcgcagcc | 436 |
| | | | a | |
| 2a | tcttaccctttccag/ | 428 | AAG/gtatgaaatgcttg | 437 |
| | AGC | | n | |
| 2b | ttcctattttcgtag/ | 429 | CAG/gttattttaaaatg | 438 |
| | CAT | | t | |
| 3 | tgatttcttttgtag/ | 430 | GAG/gtaaggatacaaaa | 439 |
| | GTG | | a | |
| 4 | tttttctttttaaag/ | 431 | AAG/gtaaaccttctatg | 440 |
| | AAT | | a | |
| 5 | aaatattccttatag/ | 432 | CCA/gtaagtaaaaaaga | 441 |
| | CCA | | g | |
| 6 | tttttctgtctccag/ | 433 | ATG/gtaagtaatcactc | 442 |
| | ATA | | a | |
| 7 | ttattttccttacag/ | 434 | gga/gtaagtctgccagc | 443 |
| | GGT | | a | |
| 8 | atttctcatttgcag/ | 435 | — | — |
| | gaa | | | |

[0048] Table 1 provides SMN1 and SMN2 splice junctions (see, DiDonato, et al., “Complete nucleotide sequence, genomic organization, and promoter analysis of the murine survival motor neuron gene (Smn),” Mammalian Genome, 10:638-641 (1999), the disclosure of which is incorporated herein in its entirety for all purposes). In the table, coding sequences are identified by capitalized letters and the end of the intron is indicated by a “/” adjacent to a three nucleotide-long non-intron sequence (e.g., a untranslated region and/or a coding exon sequence) to the right of a 3′ Splice Junction and to the left of a 5′ Splice Junction.

[0049] By “survival of motor neuron 2 (SMN2) polypeptide” or “survival motor neuron (SMN) polypeptide” is meant a protein or fragment thereof, having at least about 85% amino acid sequence identity to a polypeptide sequence provided at GenBank Accession No. AAH15308.1 and having small nuclear ribonucleoprotein (snRNP) biogenesis activity. An exemplary SMN1 polypeptide amino acid sequence from Homo Sapiens is provided below (GenBank Accession No. AAH15308.1):

(SEQ ID NO: 444)
MAMSSGGSGGGVPEQEDSVLFRRGTGQSDDSDIWDDTALIKAYDKAVAS
FKHALKNGDICETSGKPKTTPKRKPAKKNKSQKKNTAASLQQWKVGDKC
SAIWSEDGCIYPATIASIDFKRETCVVVYTGYGNREEQNLSDLLSPICE
VANNIEQNAQENENESQVSTDESENSRSPGNKSDNIKPKSAPWNSFLPP
PPPMPGPRLGPGKPGLKFNGPPPPPPPPPPHLLSCWLPPFPSGPPIIPP
PPPICPDSLDDADALGSMLISWYMSGYHTGYYMGFRQNQKEGRCSHSL
N.

[0050] In embodiments, the SMN1 polypeptide sequence is identical or virtually identical to the SMN2 polypeptide sequence and both of the polypeptide sequences are referred to as “survival motor neuron (SMN) polypeptide sequences.”

[0051] By “SMN2 polynucleotide” or “survival motor neuron (SMN) protein” is meant a nucleic acid molecule encoding an SMN2 polypeptide, as well as the introns, exons, and regulatory sequences associated with its expression, or fragments thereof. In embodiments, an SMN2 polynucleotide is the genomic sequence, mRNA, or gene that encodes an SMN1 polypeptide. An exemplary SMN2 nucleotide sequence from Homo Sapiens is provided below, where plain text represents untranslated regions, bold text represents introns, and italicized text represents coding regions (Ensemble Gene Accession No. ENSG00000205571). Splice junctions in the SMN2 polynucleotide sequence provided below are listed in Table 1.

(SEQ ID NO: 445)
ACTCTTAAGAAGGGACGGGGCCCCACGCTGCGCACCCGCGGGTTTGCTATGGCGATGAGCAGCG
GCGGCAGTGGTGGCGGCGTCCCGGAGCAGGAGGATTCCGTGCTGTTCCGGCGCGGCACAGGCCA
GGTGAGGTCGCAGCCAGTGCAGTCTCCCTATTAGCGCTCTCAGCACCCTTCTTCCGGCCCAACT
CTCCTTCCGCAGCCTCGGGACAGCATCAAGTCGATCCGCTCACTGGAGTTGTGGTCCGCGTTTT
TCTACGTCTTTTCCCACTCCGTTCCCTGCGAACCACATCCGCAAGCTCCTTCCTCGAGCAGTTT
GGGCTCCTTGATAGCGTTGAGTGGAGGCCCTGCCGCGACTTGGCAGTAGCTTATTTTGTTCACT
CCTCTCTGGCTGGTGTGGGGGAGGTGGGGGCATTAGGCCAGGGTGAAGCAGGGGAACCACTTAG
GAGTCTGTTAAGATGATCTGAACTTCAGAACAAGATGTTATTAACAGAGTGAAAGTATTTGGAT
TCTGGGTATATTTTGAAATCGGAGGCAACAGGTTTTTCAGATAGATTCGATAACGGAGGTTATC
CTGAATAGTTGAAAAGATAAAGTTGCCTTTTGCTGAGGTGGGAAAGAGAAGATTGCCAGTAGAG
CAGGTTTCTCAGGAGTTCAGTCTTGGGCATAGCATGGTAGGGGTGAATTTGGCTGGAGTGAGTT
GGAGAGTAGGAGAAGAGAAATCCAAGGCAACATTTGACCAGCCTGGGCAACATAGTGTGACTCC
GAGTCTGCAAAAATTAGACGGGTGTTGTGGTGCGCGTCTGTGGTCTCAGCTACCTGGAAGGTTC
AGGCCTTGGAAGGCTCAGGGAGGTGGAGGCTGCAGTGATCTGTGATTGCGCCTCTGCACTCCAG
CCTGGGCGACAGAGCCAGACCCTGTCTTAAAACAAAATAAACGGCCGGGCGCGGTGGCTCAAGC
CTGTAATCCCAGCACTTTGGGAGGCCGAGGCGGCCGGATCACAAGGTCAGGAGATCGAGACCAT
CCTGGCTAACACGGTGAAACCCCGTCTCTACTACAAATACAAAAAATTAGCCGGGCGTGGTGAC
GGGCGCCTGTAGTCCCAGCTACTCGGGAGGCTGAGGCAGGAGAATGTCATGAAGCCGGGAGGCG
GAGCTTGCAGTGAGCCGAGATCGCGCCACTGCACTCCAGCCTGGGCGATAGAGCAAGACTCCGT
CTCAAATAAATAAATAAATAAATAAATAAATAATAAAAACATCGGTAGGCATATTTCAAGGAAT
TCTATTTAAAAAAAATTTTTTTAGAGACAAGTTCGCTCTCTGTGGCCCAGGCTGGAGTACAGTG
GCATGATCCTAGCCCATGGCAGCGTTGATCTCTTGGCCTCAAGCGACCCTCCTTTGGAGTCGCT
GGGCCTAAAGGAGTGAGCCACCACGAAATTTTATTATAAATGGAGGGTAGAGAAATTGGGCAAT
AAATGGAGGGGGAAGTGAGTTAAGAGGAATTTTAATTATGTGTGTGTGGTTTTAAAAGAGGGGG
GTCTTGCTCTGTTGCCCAGGCTGCTGGGGTGCCAGTGGCGCAATCATGAATCACTACAGCCTTG
GACTCCTGGCCTCAAGCTATCCTCCCACCTCTGCCTCCCAAAGTACTGGGATTACTAGTGTGAG
CCACTGCACTAAGATAGGAGCAACATGTTTCAGCATGTTTGTGGGTTGATAGGAAAGATGAGAA
TGGGAAAGTTGATGTCGGAAAGAAGACAATGGCTAGAGCAATGTCCTAGAGTAGGTAAGAAGGG
ATGGATTTGGCCTTTGTTGGAAACATTAGCGGTTCTTTTGGTGACAGCTATATAGTTAACACAT
CTATGATACGTGAATGGGCAGATAGGATGGCAGGAGATTTTGAAAGTTCTCTTGATTCTTACTG
TTCTCTTAGTGAAAGAAGCAAGGTTATCAGCTAGAAGCTGGGATGGGAGAGGAAAGAGAAGATG
GGAAGTAGATAGTTCTTTAGAAGAGTGGGCAAGGGTTGGACTAGGGAAGTTTAGTGGAAATATT
GCTAGGCAACATAAAGAGCCTACTTGAGATTCGTGGTCATGAGTTGAAGGAGACCAGACAGCAA
GATTGTGTATGAGGGCACCCACAGAGTAAATGGAGAGTTGAAATTAATGCAGTTGTGATTTTAC
CACGTGGATATGAAGAAGTGAGGGGGAGAAGTACAAAGGAGTTCTCTTAATGATTGACCATGGA
ATTTAAGCTGGCTAAGAAAGGAAGTGAGAGGCCGGGCGCGGTGGCTCACGCCTGTAATCCCAGC
ACTTTGGGAGACTGAGGTGGGTGGATTACCTGAGGTCAGGAGTTTGAGACCAACCTGGCCGATA
TGGCGAAACCCCATCTCTAATAAAAATACAGAAAAATTAGCCGGGAATGGTGGCAGGTGCCTGT
AATCCCAGCTACTCAAGAGGCTGTGGCAGGAGTATCCCTTGGACCCAGGAGGTGGAGGTTGCAG
TGAGCCGAGATCACGCCACTGTACTCCAGCCTGGACGATATAGTGAGACTTCACCTCAAAAAAA
AAAAAAAAGAAAGGAAGTGAGGATTTTAAGACCCTGAGAGACAGTTTAAAAAGTGGGAGGATCG
GCCGGGCGCTGTGGCTGACACCTGTAATCCCAGCACTTTGGGAGGCCGAGTTGGGCAGATCACA
AGGTCAGGAGTTCGAGACCAGCCTGGCCAATATGGTGAAACCTTGTCTCTACTAAAAATACAAA
AATTAGCCGGGCATGGTGTCACGTGTCTATAATCCCAGCTACTCGGGAGGCTGAGGCAGAAAAA
TTGCTTGAACCTGGGAGGCAGAGGTTGCAGACAGCTGAGATCACTCCATTGCACTCCAGCCTGG
GCAACAAGAGCAAAACTTTGTCTTTAAAAAAAAAAAAAAAAAAAGAATACAAAAATTAGCCGGG
CGTGGTGGCGCGTGCCTATAATCCCAGCTACTTGGGAGGCTGAGGCAGGAGAATCAGTTGAACA
CGGGAGGCGAGGTTTGCAGTGAGCCGAGATTGCGCCACTGCACTCCAGCCTGGGCGACAGAGCA
GGACTCCTCTTGGAAAAAAAAAATTAGCTGGGCATGGTGGCAGGTGCCTGTAGTCTCAGCTACT
AGGGAGGCTGAGGCAGGAAAATCACTTGAACCCGGGATGTGGAGTTTGCAGTGACCCGAGATCG
TGCCACTGTACTCCATCCTGGGCGACAAAATGAGACTCTGCCTCAAAAAAAAAAAAAAAAAAAA
GTGGGAGGATCAATGTACTGCCAGTCCTAATGAAGTGGAATGATTGTCCCCATCAAATCACTAG
TAGGAGTAAGTTGCAGAGCCTAGAAGGTGATGGTTAAGAGAGTGGGATTCTTGAAACTGCATTT
ATGGAGAGGTTGTGGTTATTGGTTATAATAAATAAATACAGTTGAAGTGAGTGAGTAGCTGAGA
TTTGGGGATGTATCAGTTCATTCTTACACTGCTACAAAGACATACCTGAGACCAGGTATTTATA
AAGATAAGAGGTTTAATCAGCTCACAGTTCTGCTGCCTGTACAGGCTTCTCTTGTGGAGGCCTA
AGGAAACTTACAGTCATGGTGGAAGGTGAAGGGGAAACAAGCACAGTCTTCACATGGCCAGCAG
GAGAGAGAGAGAAGGGGGAAGTGCTACATACTTTAAAACAACCAGATCTTGTGAGAACGCTTAT
CAGGAAACAGCACTTGGGGATGGTGCTAAATCATTAGAAATCACCCCCATGATCCAGTCGCCTC
CTACCATGCCCACCTCCAACACTGGGGATCACAATTCAGCATGAGATTTGGGTAGGAACACAGA
GCTGCACCACATCAGAGGATGTACAAGATTGTGGTGGAGAGGAGTTTAGAGACCTGCAAATATA
GGGTAATTGAAGGGATCATCTACATGGATATTTAAATCACCAAAAATTATGACAGGAGTAGTGT
TGGAGAGAGAACTGCGATGTAAACATTAAGGAATGAGGAAGAGTGACTCGGTAGGCTGTAGGTG
ACTGCAATAGGAAACGATAATAGACTGTGAGTCTGGTGACAAGATTTTCCTTCTTTCTTTTTTT
CCCCCCCCCCGAGACAGGGCCTCTTTTTGTTGCCCAGGTGGGAGTGCAGTGGCGCGATCACGGC
TCACTACAACCTCCTCCCAAGCTCAAGGGATTCTCCCACTTCAGCCTCTCAAGTAGCTGGAACT
ACAGGTGCTGACCACCATGCCTGGCTACTTTTTGTCAGGATTTTCAAGGCTGGGAATTTTGAGA
GGGGAATGGAGGAGAATAATCTGAAAGTGCAAGTAAGGAGCAGGGAAGATTTCTTTTTTCTTTT
TTTTTTTTTTTTTTGAGTCGGAGTCTGGCTCAGTCGCCCAGGCTGGAGTGCAGTGGCGAGATCT
CCGCTCACTGCAAGCTCCGCCTCCCGTGTTCACGCCATTCTCCTCCTTCAGCCTCCCGAGTAGC
TGGGACTACAGGCGCCCGCCACCACGCCCAGCTAATTGTTTTTTTGTATTTTTAGTAGAGACGG
GGTTTCACCGTGTTAGCCAGGATGGTCTCAATCTCCTGACTTTGTGATCCGCCCACCCCGGCCT
CCCAAAGCGCTTGGGATTACAGGCGTGAGCCACCGCGCCAGCCAGAGCAGGGAAGATTTCTTCC
CCACATCTCCAGTAGGTACAGTGATATGAAGTGTGTGGAGGAGAAAAGAGGAAACATCTATCAT
TTGAGATGGCTGCGAAAGGAAAAGGCATCCTCAGGGAGCTAGATTTTACTTAGAGCAAGAAATG
AAGGGATGATTCAGAGGTTAAAAGAGTGGATTTTATGAATTACTCAAGGGAGCACAGTGGAAGT
TTCAGGAAGTGGTAGGAGAAGGTAGAAGATGGCAGGGTGTTGGGAATAATTTGAGAAATCTGAG
CTACTGGAAATGACTGAGAATCAGATATAAAGGCAGTCCTGGTGGTCCGTTCTGGCTGCCGTTG
CTGTGTAACGAATCTGCCAAAACTTAGTGGCTTGAAACAACAAAGAACATTTTATTATCTCTCA
TTGTTTCTGTGGGTTAGGAATTTGTGAGAGCCGTGCTGGGCAGTTTTCGTGCGGCTGTCTCGTG
GTTGCACCTACATAGTTGCTAGAGCTACAGTAGCTGGGGACTGAGCAGCTAGGGATTGGCAGGC
TATCTCTTTTTTTCATGTAGTCTCATGAAGATTTCTTTATGTGGTTTCAATGTGTGGGCTGGTT
TGGATTTCCTTATAGCATGGTGGCCTCAGTTGGATTGCTGTTTTGTGATCCTTTTCATCCCTCC
TTGTCCTGTCCCCAGACAACCACTGATCTACTTTCTGTCACCATAGATTAGCCTGCATTTTTAA
GAATTTTTATAAACGTGGAATGATAGAGTACCTTTTTTGTCACGTTTCTTTTATTTATCATAGC
TATTTTGATTTTCATCCATTTTATTGCTGAGTAGTATCCCATTGCATGTATATACTATACTGTA
TTCATTCGCTTGCTTGTGAACATTTGGGCTTTTTCCAGTTTGGGACTGTTAACAAGTAGAGCCA
CTATGAATATTAGTGTATAAGACTTCATATAGCCAAGGCTGGCAGATCGCTTGAGCCCAGGAGT
TTGAGACCAGCCTGGGAAACATGGTGAAACCTCTATTTTTATTTTAAAATCAAAAATTAAAAAT
TTTCTATAAAAAATTTTAAAGAAGACTTTGTATAGACATACGCTTTCATTTTTCTTGAGTGAAT
ACTTAGGTCTCAGGGTAGATGTATTTTAAGTCTTTAAGGAGCTGTCAAACTCTTCCTCAAAGTG
GTGGTTGTACCATGTTACTTTTTAATATAACAGAGATTAATTGAGCAAAGAAAAATTCAAAAGT
TGGACAGCCCCCACAACTAAATAGGTTCAGAACAGCTCCCCCATTTTGCATTTTGACCAGCAAT
GTATGAAAGTTCCATTTGCTCAGTGTCCCTGCAAACACCTGGTATGGTCAGTCTTTTTAATTTT
AGGCATTATAATAGATATAGTGGCTTCTTGTGATTTTAATTAGCATTTCCTAATGACCAGTGCT
GCTGTTGATCATTTCATGAGTGTATTTGCCATCCGTATATCTTTTTTGGTGAAGTGTCTATTCA
AATCATTTGGGTTTTTTTTTTTTTTGTTTTTTTTTTTTGGAGACAGTGTCTCACTCTGTCACCC
AGGCTGTTGTGCAGTGGTGCAATCACACAGCCTACTGCAGCCTCCACCTCCTGCGCTCAGTCTT
CTTGTCTCAGCCTTCTGAGTAGCTGAAATTACGAGCACACGCCACAATGCCTGGCTAATTTTTT
AAAATTTTGTAGAAACAAGGTCTCATTATGTTGCCTGGGCTTGTCGTGAACTCCTGGGCTCAAG
CAATCTTCCTGCCTCAGCCTCCCAAAGATTGGGATTGCAAGTATGAGCCACTGCACCCGGCCAA
CTTACCCATCTTTTAATTGAATTTTTTTGTTGTTGAGGTTTGAGAGTTCTTCATGTTTGCTGGG
TACAATATCTTTATCAGATAGGTAACTTGCATGTATTTTCTCCCGGTTTACACTTTGGTTTTTC
ATTTTGTTAACAACGTCTTTTTAAGAACAGAAAATCTTAATTTTGCTGAAATCTAATTTTTCAG
TTTTTTCTTTGATGGTTTTGAGAGAGGAGGTAAAAAAAGACTAGGTAAGCCGATAGTTAGACAG
AGTCCTCGGTAGAACTTCCCTTCTAACAAAAAGCAGCCCAAGAAATCACTTCTCTTCTAACAAG
GAGCAGCCTGGAAGATCGGGCTGTAAACATGTATAAGGAAGCAGCTCTGGCACAGAGGGGGAGC
TTCCTGGGTAATCAGCAAGCTTCACATACGTAAGGTGGGTATGTGAAGTAAACACAGTATGTGA
AGTAAACACAGTGGACCTTAGTACATACTCAGATAAGGAAGCTGGAAGCTTGCATGTTGTGAGT
TGTTGGGGTTGCCTGCAGCTGCACGGAGAGAAAGGGGTACCTGGGGCCAGGCATGTCCACCATG
GTGGCTCCACCTCCCCTTATTTAGCACATGCACAATAGGAAAGAGATAAGCAATGTGGAGTAGC
TCAGGCCAAGGACCTGCCTGCATAATAAAAGGTTGGGGTGGGGGATGCCAGAGATTCACGCTCT
GTGCAGATGGCAACACCTGGTCCTAACTGGTTTTTTGCTCCCTATGTGTAGATAAGCTACCCCC
TTCCCATTAGCTCATTTATAAAAATGCTTGCATTTCACTGTGGAATGGGAACTCTTTTCAGGAC
CTCTCTCTGCAGGAGAGAGCTAGTCTCTTTCTTTTGCCTATTAAACTTCTGCTCTAGCCTCACA
CCCTTGGTGTGTCAGCGTCCTTGATTTCCTCAGCGTGAGACCAAGAACCTCGGGTGCCACCCCA
GGCAACAAGGCCATTTCAGTTTGTTCTTTTGTTATAGGCAATCCATGATCACAGATTTTTCTCT
CTTTTTTTTTTTTACACAGTTTAGAGTTTTAGTTTTACACTTAGGTCTGTAATCCATTTTGTAT
TAATTCTTATATGTGGCTCAGTGTAGGTGGAAATTTGGTTTGTTTTTGCATAAGGATTTCCAAT
AGTTTTACCACCATTTCTTGAAACTACTATGCTTTCTCTATTAAACCACATTTGTAACTTTAGT
TAAAATCAGTCACATATATCACAGGGCTATTTCTGACTCTCAATTCTGTTACATTGTCTATTAG
TGTATATTGATGTCAGTACTACACTTTTAATTACTATTGCTTCAGGGTATGTCTTGTAAACCAA
AAATAAAATTATAGGCCCCCCCCGCCCCTGCACAACCAACTGAATGGACCCATCCTCTCAGCCA
AGGGCATTCCAAAATTAACCTGAAAAACTAGTTCAAGCCATGATGGGAAGGGGGAGTTGGACAT
GTCTCATCACACCCTACTACCTTTTGGAATTACTGATAGAACAGACTCTTAAAGTCTGAAAAGA
AACATTTACAACCTACCCTCTCTGAAGCCTGCTACCTGGGAGCTTCATCTGCATGATAAAACCT
TGGTCTCCACAACCCCTTATGGTAACCCAAACATTCCTTTCTGTTGATAATAACTCTTTCAACT
AGTTGCCAATTAGAAAATCTTTAAATCTTCCTATGACCTAGAAACCTCCCTACCCCCACTTTGA
GTTGTCCTGCCTTTCCTGACAGAACTCATGTACATCTTACATATATTGATTGATGCCTCATGTC
TCCCTAAAATGTATAAAACAAAGCTGTACCCCACCACCTTGGGGACATGTCATCAGGACCTCCT
GTGGCTGTGTCATAGGAGCGTCTTTAACTTTGGCAAAATAAACTTTCTAAATTGATTGAAACCT
GTCTTAGCTACTTCTGGTTTACAGTCTTAAAGTTAGATAATGTAAATTGTCCAGCTTTGGTTTA
TTTTTGTCCTTAGTAGTTCCATATAAATTTTAGAATCAGCTTTTCAATTTAATACACTACTTTC
CTCTTAGATCCACAATTAAATATATTTGATGCTAACAATTCTGTTTTATGTTTTTCGTTTTTTT
TTTTTGAGACAAGAGTTTCGCTCTTGTTGCCCAGGCTGGAGTGCAGTGGCGCGATCTTGGCTCA
CCACAACCTCCACCTCCCAGGTTCAAGCAATTCTTCTGCCTCAGCCTCCCGAGTAGCTGGGATT
ACAGGCATGCGCCACCACGCCCGGCTAATTTTGTATTTTTAGTAGAGACGGGGTTTCACCATGT
TGATCAGGCTGGTCTTGAACTCCTGACCTCAGGTGATCCACCCACCTCGGCCTCCCAAAGTGTT
GGGATTACAGGCGTGAACCACCATGCCTGGCCAGTTCTGTTATTTTTAAAACCCAAGTTTCCCT
GGTCATATCTTGGTTGGATGAAGCGTATTTTCAATAGATTACCCTGGAAAGGCTAGTGAGTACG
GTATTCTTCTACATTTTAGACTTTTCTTAGTCTTGCTACTTCAAGGACAGCTAGGCTGCATATA
AAATTCTTGGCTCATACTTTTTCCCCATAAATTTCTATGAGAAAGTCTAATGATAACTGATTTT
CTTTATTTTGTAACTTAGTCTTTTTGCTTAGAGGCTCTCTGAGGATGGGAGGGGGTTCTTCCTC
CCATCCCTAGGAATTTTTCTTTTTTTTAAATTCCTAATCACTAGACCACCAGGAAGATTGTTTG
TTTTGTTTTGTTTTTATTCTTCAGGGACCCCATTTATACATACGTTAAATAAATACTGTTTGCC
AATGTATCAACCATTTTGCTTCTTATTTATTTTTGTTCCTTTGGTTCTTTTTCATGGCTTTGCT
TTGGTGCTCCTTAGATTTTCAGTCAGATGTATTTGTCCTTGGGTACCTTGTAATCAGTATTACC
TTTTCTTCTGTCGCTTTGTTTTCTGTTCGTTTTGAAATTACTTGTTTCCTGGTCTGGCAATAAC
AGTTGAGATATGAGGAGTTTGAGCTGCCATCTGTCTATGTATCTTGCTTTAAGACTGCACTCTT
CTATTGATATCACTGGCCTTGATTTTGTGATTTCTTTATTTCTTCAGGACCACCCTTCATTTTC
TACTGTTTGCTTCCTTTTTTTTTGAGATGGAGTCTCACTCTGTCACTCAGGCTGGAGTGCAGTG
ATCTTGGCTCATTGCAACCTCTGCCTCCCGGGTTCCAGCAATTCTCCTGCCTCAGCCTCCCAAG
TATCTGGGACTACAGGTGTGCACCACCATGCCCGGCTAAGTTTTGTATTTTTAATAGAGACGGG
GTTTTGCCACATTGGCAGGCTGGTCTCAAACTCCTGATGTCAAGTGATCCACCCACCCCACCCA
CCTCTGCATCCCAAAGTGCTGGGATTACAGGAATGAGCTGCCGTGCCCAGCCTCCCCCCTACCC
CCCTTTTTTTCTTTCGAGACAGAGATTATAGGTGTGAGCCACTGGACCCAGCCTGTTTTTATTC
CTTTTACCAAATCTCCAAGGAATATCTTCCCTTCCAAGTGCGAATGTAACCTTAAGTCAGTTAA
CCTCTTTGTGATTACTTTTCTTATCTGCAAAGTGACTTAATGATCTTAAGTACTTTTTTTTTTT
GAGACAGGGTCTCACTGTCACCCTGGCTGGAGTGCAGTGGCACGATCTCTGATCTCCACTCACT
GCAATCTCCTCTTCCCTGGTTCAAGCGGCCCTCCCACCTTAGCCTTCTGGGTAGCTGGGACTAC
AGATGTGAACCACCACGCCCAGCTAATTTTTGTACTTTTTGTAGAGATGGGGTTTTGCCATGTT
GCCCAGGCTGGGATTATTAAGTACTTTTTATCATACAGCAAGATTGACATTTTATATTGGAATA
CATTTGTCTCTATATAACGGAGATTAACAGGAAAATGACAAGCCTGGGTGCGGTGGCTCATGCC
TGTAATCCCAGCACTTTGGGAGGCTGAGGTGGGAGGATCACTTGAGGTCAGGAGTTCGAGACCA
GTTTTGCCAAGATGATGAAAGCCCATGTCTACTAAAAATACAAAAATTAGCCCAGCTTGATGGT
GGGCGCCTATAATCCCAGCTATTTGAGAGACTGAGGCAGGAGAATCACTTGAACCTGGGCAGCA
GAGGTTGCAGTGAGCCGAGATCATGCCACTGCACTCCAGCCTGGGTGGCATAGCGAGACTCTTG
TCTCAAGAGAAAACAAAACAAAACAAAAAAAAAACAGGAAAATGACAAAAAGTAATATTACAAC
TCAGTGAATTTTATAACAAACTTTTTTGGAATTCATTGACTAATACTATACCAAATCCAAAATA
CTCTCTAGTATACCAAATCCAACTCTACCCTATAGTATAAATTGGATTCTATTTGGACTTGTCT
CACTAATCCCTCATACAGTGTGTTTTATTTTTTATTGAAGTAAAAAAATTTGTCATTTTAACCA
TTTTTAAGTATATAGTTCAGTAATATTAAGTATGTTCATGTTGTTGCGCAATAGATCTTCGGAA
GTTTTTCGTCTTGCAACCTGAAACTCTACCCATTAGCAAATTCCCATTTCTCCTTACACTTAGC
CCTTGGTAATCATCATTCTTTTTTTTTTTTTTTTGAGATGGAGTTTTACTCTTGTTGCCCAGGC
TGGAGTGCAATGGTGCAATCTCGACTCACCACAACCTCCGCCTCCCAGGTTCAAGCAATTCTAC
CTCAGCCTCCCGAGTAGCTGGGATTACAGTCATGCACCACCACGCCCGGCTAATTTTGTATTTT
TAGTAGAGAAGGGGTTTCTCCATGTTGAGGCTGGTCTCGAACTCCTGACCTCAGGTGATCTGCC
CACCTCGGCCTCCCAAAGTGCTGGGATTACAGGCGTGAGCCACTGCGCCTGGCCCATTCTTTCT
AATTCTATAAATTTGACTACTTAGTTACCTTACATAAATAAATTCTTATAGTTAGTGTTATTTT
TGCTTCCATGCCTTTTTTGTTGTTGTTCATGCTCTTACTTGGAATGCGTTCTATTTTGTCTACC
TATGCACATCCTGTTGGGTTTTTTTTTTTTTTGGGGGTTTTTTTTGTTTTTTTTTGTTTTTTTT
TCCCAGACAAGGTCTCAATTTGTTACCCAGGCTGGAGTGCAGCGGCGCCATCTCCACTCACTGC
ATCCTCAACTTCCTGGGCCCAGGTGATCCTCTCGCCTCAGCCCCTGCAGGTAGCTGGGACTATA
GGCATGTGCCACCATGCCCAGCTAAATTTGGTTTTTTTGTTTGTTTGTTTTTGAGACAGAGTCT
CACTCTGTCACCCAGGCTGGAGTGCAGTGGCACAATCTCAGCTCACTGCAATCTCTGCCGCCCG
GGTTCAAGTGATTCTCCTGCCTCAGCCTCCCAAGCAGCTGGGATTACAGGTGACTGCCACCACG
CCAGCTAAGTTTTGTAGTTTTAGTAGAGATGGGGTTTCACCTTGTTGGCCATGCTGGTCTCGAA
CTCCTGACCTCGTGATCTGCCTGCTTCTGCCTCCCAAAGTGCTGGAATTACAGGCATGAGCCAC
CACGCCCGGCCAGAATTTTTGTATTTTTAGTAGACACAAGGTTCTTACCCTGTTGCCTAGGCTG
GTCTGGAAGTCCTGGACTCAAGCAATTCACCTGCCTTGGCCTCCCAAAATGCTGGGATTACAAG
CCACCATGCCCGGCCTAAATCCTGTTGTTTTGTTTTGTTTTATTTTGTTTTGTTTTGTTTTGTT
TGTTTTTTGAGACAGAGTCTCGCTATGTCTCTCAGGCTGTAGTGCAGTGGCGCGATCTTGGCTC
ACTGCCACCTCTGCCTCCCAGGTTCAAGTGATTCTCCTGCCTCAGCCTCCCAAGTAGCTGGGAT
TACAGGCATGTGCTACTATGTCCGGCTAATTTTTGTATTTTTAGTAGAGACAGGGTTTCACCAT
GTTGGCCAGGCTGGTCTCGAACTCCTGACCTCGTGATCCACCCACCTCGGCCACCCAAAGTGCT
GGGATTACAGGCGTGAGTGGTTTTTATTTCTTAGGCCGGTTTCCTCCATATGATCTTGCAGTAG
ACATTAATTTCTTTCCTTTTTAATTAAAATACTGTTTGTATTTCACATTTTGATGTTTGTTAAG
ATTTGTTTTATATTGTTTTTTGTTTTGTCTTGTGTGATAGTCTTAAATCCCTAGTTAGATAATA
ACTGGAGAGTACCATGTTTCTATATATCTCTCAGTGACTTGCACAGTGCTAGCAGATAGTGCTA
AAAAATTATTTATTATTATTATTATTTTGTTATTGTTGTTGTTGTTGTTAGACAGGGTCTTCCT
CTGTCACCCAGGCTAGAGGGCAATGGGATGATCATAGCTTACTGCAGCCTCCAACAACTGGGCT
CATGTAATTCTCCTGCCTCAGCTTCCCAAGTAGCTGGGATTACAGGCATGAGCCACCATGTCTG
GACAAAAATATTTCCAGGTGCAGTGGCTCATGCCTGTAATTCCCACACTTGGGAGGCCGAGCGA
GGCTGGAGGATCACTTGAGCCTAGGAGTTCAAGACCAGCTTGGCTAAGATGGCGAGACCCCGTC
CCTACAAAAAATTTTAAAAACTAGCCAGGCATGGTGGCATGCACCTATATTCCCAACTACTCAG
TGGGCTGAGGTGGGAGGGTCATTTGAACACAGGAATTTGAGGGGAGAAAAAAAGAAGAGAGAAA
GAGAAGTGAAGGAAGGAAGAAAGGAAGGAGGGAGGGAGAGAAGAAAGAAACGAAAGAAAGGAAA
AGAAAAGGAAGGAAAGAAAATTGGTACCAGGAAAGCAGGAAAGGGAAATGGAAGTAAAAAAATA
ATAATAATAATAAAATGAAAATTGGTTAGTCACTATTAACAATTTGTATCCTTATAATCTGGAA
ACATTATAATTTCAAAAGAAAAAATATTCTTTGGATCATAGGTTCTGAGGTCAGAACAGCATTC
CCGTAGTCTAGATGAAGTCAAGTTTTATCTGATCTTAATTGAAATAAATATAGCTGGCCTTGAA
CAAATCTACTCATGGTATGTGGATAGGAATTAAATTGTAGGGGCATTCACTTGATGGCATTCAT
TCTTAGAACATTTACCTATGTCTAGCTTTTGGAGTAAAGTCACATAACCTCTAACCAGGTAAGT
TTCCTGTGGCTTTATTTAGGATTTTAAATACTCATTTTCAGTGTAATTTTGTTATGTGTGGATT
AAGATGACTCTTGGTACTAACATACATTTTCTGATTAAACCTATCTGAACATGAGTTGTTTTTA
TTTCTTACCCTTTCCAGAGCGATGATTCTGACATTTGGGATGATACAGCACTGATAAAAGCATA
TGATAAAGCTGTGGCTTCATTTAAGGTATGAAATGCTTGCTTAGTCGTTTTCTTATTTTCTCGT
TATTCATTTGGAAAGGAATTGATAACATACGATAAAGTGTTAAAGTACATGTTATTCAGTTTTC
ATTTTGAAGATTAGATGGTAGTATGAGTTAGTTAAATCAGGTGATATCCTCCTTTAGAAGTTGA
TAGCCTATATATGTCATCCTTTGTGGAGGCAATTTAAATAAAATTTAAAACATTTATTCCTGGC
TGGGTATGGTGGCTCACTCCTGTAATCCCAGCACTTTGAGAGGCTGAGGCGGGTGGATCACCTG
AGGTCAGGAGTTTGAGACCAGCCTGGCCAACATGGTGAAACCCCGTCTTTACTAAAAATACAAA
AATTAGCCAAGCATGGTGGCACGTGCCTGTAATCCCAGCTGCTTGGGACACTGAGGCAGGAGAA
TTGCTTGAACCTGGGGGGCAGAGGTTGCAATGATTGCACCACTGCACTCCAGCCTGGGCGATAG
AGTGAGACTCCATCTCAGAAAACGAACAAACAATGTATTCCTTTTAGTATTTTTACATTGTATC
AAACTATGGAAGTCCTCTAATTGAGATTAATAAGAAAAAGACAATCTGAATTATAATTTTAAAC
ATTTAACAAGCATGTAGTAAAATAATGATGAAGATAAATAGCATTAGTACAGCAATTAATATTT
GTAGCATGCTGACAGTGCTCTGTGTGCGTTTCATATATTAAATTACTCTAATCATCCCAAATCC
TGTAAGTTGGGTATCAATTCAAGTGTTCCTATTGGGTAGGAATATACAGTTCTTTTAGGAAATG
TAGTATGGTTCTGTGTCTCAAACAGGACACTTACACAGTTGGCCAACATCATCACCTTCTCCAT
TCTCTGAGATGTTTAGTCTTACTGAGCACTAAATATGGGTCATCAATAGTCCAGACTACCTTGA
GCAAACAATAGTCCAGACTACCTTGAGCAAACAGAGCATATACTCATACAGTGTATAAAGAGCA
CCAAGCATACAGATTTCATGTCTTTCTCATAGTTACTCTTGTAACATGAGCTAAAGATCAGACC
TCTATGTCACCTTTGTAACTGATTTCTAGATTTTTTTTTTTTTTTGAGATGGGGTCTTGCCCTG
TCACCCAGGCTGGAGTGTAGTGGCGTGATCATGCCTCATTGGAGCCTTCAACTCATGAGCTCAA
ACAATCCTCCTACCTCAGCTTCCTGAGTAGTTGGGACCACAGGTGTGTGCCACCACACCCAGCT
CATTTTTGTATTCTTTGTAGAGATGCAGTCTCACCCTGTTGCCCACGCTGGCCTGGAACTCCTG
AGCTCAAAAGATCCCTCCGCCTTGACCTTCCAAAGTGCTGGGATTACAAGCATGAACCACTGCA
CCCGGCCTAGATTTTTAAATGTGCTTTCCAGTATACACTGAAACTAGAAGTCGACTAAAGAATT
ACCAAGAGAATTCTATAAAATAGAGATTGAAATGGGGCTCGATGTGGGATGGGTTGGTGATATT
GCAGGGAGAAGTAATCTGAGTAAAGGAGGAAAAGAACTGATTTGGGAAAACGATAGTTTTAGTA
GTGAGTTTGAGTATGAATTAAGTTGAGATTGAATTTGAATTAAGTTGAGGTTGAATATGAATTA
AGTTGAGGTTGAGTTTGAGGTATGAATTAAGATGTGAAATTGATCATTGGAAATGTTAGATTGA
GAAAAGTCACAGCTGGATTAATAGCTTCAGAAGTGTGTTTGCAGACAGTTGCAACTAAAGTAAT
AAGAATAGATGGCCTTGGCCGGGCGCGGTGGCTCACGCCTGTAATCCCAGTACTTTGGGAGGCT
GAGGCGAGCAAATCACGAGGTCAGGAGTTCAAGACCAGCCTGGCCCACATGGTGAAACCCCGTC
TTTATTAAAAATACAAAAATTAGCTGTGCACAGTGGTGCACGCCTGTAATCCCAGCTACTCGGG
AGGCTGAGACAGGAGAATCGCTTGAACCTGGGAGGTGGAGGTTGCAGTGAGCTGAGATCAGTGT
GACTGCACTCCAGCCCGGTGACAGAGTGAGACTCTGTGTAAAAAAATAAAATAAATAAAATAAT
GGCCGTAAGCAAGTAAAGAAGGATGGCCAGCTCTTATTGGGAATGCCTAAATCTAAGGCTTGAT
CAGAAGTAATGAAACCGTTGGGGCCCTACATTGCTATGACATCCAAAGGGCCATGAATATCAGG
AAGAAAGATAATTAACAGGGTCTAATGTTACAGAGAGGTTGAGAGCAAGGAGATTTGATTAAAA
GGGTCTTTAGAGCTGATGTCAGGTGTATGATGCCTTTAAGAGCAGTTTTTATAGTGCAGGGGGT
GGTCAAAAGAGAAAATAGGTGCTTTCTGAGGTGACGGAGCCTTGAGACTAGCTTATAGTAGTAA
CTGGGTTATGTCGTGACTTTTATTCTGTGCACCACCCTGTAACATGTACATTTTTATTCCTATT
TTCGTAGCATGCTCTAAAGAATGGTGACATTTGTGAAACTTCGGGTAAACCAAAAACCACACCT
AAAAGAAAACCTGCTAAGAAGAATAAAAGCCAAAAGAAGAATACTGCAGCTTCCTTACAACAGG
TTATTTTAAAATGTTGAGATTTAACTTCAAAGGATGTCTCATTAGTCCTTATTTAATAGTGTAA
AATGTCTTTAACTTAAGTGATTAGTACAGTGTTTCTATTGACATATACTTATACAACTTCAAAA
ACAACTATTAAATTTTCTGTTATTTAGGAACATGCATATTAGTCATGAAAGTATAAAGAATTAG
ATGGGAATGATAAATGCTAAAATCAGGACATGTGTTCCATTTGTGAATGGAAGGCAGGGAGAAG
GTGCCGTTTGGAAGGAGTACCCAAGAGCCGTAAGCTGAATTGGCAGTGTTTTACATCTTAAGCT
GAGAGATAGATTTTTTTTTCCCCTTTTTCTTTAAAAACTCTAAAACTGTTAATTCCAAGGAACC
CAGAAGTCTAGGTAGATTATTTCTGCTAGTTAAAAGCAGTAGTCCTGAAAGCTGAATATTTTGG
TGTCTTTTGAGCCAACTTTAGTTTCATCATTACCAAGGGGGAAGAGAGCTAACAGTTGATGAGC
ACTTGCTCTAGGCCAGTCCAGAGTGCTGGGCACCATACGCATTTTATCTCCCTCCCGCTATTCA
CAACAAATATGGGAGGTAGTTTATATTATAGCCATCTAATAAGATGGGGAAACTAAGACTCAAA
GAGATTCAGAAACTTGTCCATGATTATAAATGTAAGAGAGTTGGAATTCAGATTTATGTATTTA
GACCCCAAGCCTTTCTCATTACATCATTTTGCCTTCCAAATCTCTACCCTCTATCCTTCACCTC
CCCACTGATCAAAACGAGATGATAGTTTGCCCTCTTCAAAAGAAATGTGTGCATGTATATATCT
TTGATTTCTTTTGTAGTGGAAAGTTGGGGACAAATGTTCTGCCATTTGGTCAGAAGACGGTTGC
ATTTACCCAGCTACCATTGCTTCAATTGATTTTAAGAGAGAAACCTGTGTTGTGGTTTACACTG
GATATGGAAATAGAGAGGAGCAAAATCTGTCCGATCTACTTTCCCCAATCTGTGAAGTAGCTAA
TAATATAGAACAAAATGCTCAAGAGGTAAGGATACAAAAAAAAAAAAATTCAATTTCTGGAAGC
AGAGACTAGATGAGAAACTGTTAAACAGTATACACAGTTGTCAGTTTGATCCACCGAGGCATTA
ATTTTTTCTTAATCACACCCTTATAACAAAAACCTGCATATTTTTTCTTTTTAAAGAATGAAAA
TGAAAGCCAAGTTTCAACAGATGAAAGTGAGAACTCCAGGTCTCCTGGAAATAAATCAGATAAC
ATCAAGCCCAAATCTGCTCCATGGAACTCTTTTCTCCCTCCACCACCCCCCATGCCAGGGCCAA
GACTGGGACCAGGAAAGGTAAACCTTCTATGAAAGTTTTCCAGAAAATAGTTAATGTCGGGACA
TTTAACCTCTCTGTTAACTAATTTGTAGCTCTCCCATGAAACTTTTGTAGCTTAAATACACAAG
AATTTTTTGAAAAGGAAATAAGATAATGATGCAAAATAGTTAATTTTTTAAAAAAATGTTAGAC
ACTGCAGTGGATGCAACAAAATACTTTATATGAAAGATTTATCCAGTTAACTTTTGTGGAGTAT
TAGGTATTAGACTAATAATTAGCACACTTACTTAAGTTAGAAAGTATAATAATGCGCCGGACGC
GGTAGCTCACGCCTGTAATCCCAGCACTTTGGGAGGCCAAGGTGGGCGGATCACAAGGTCAGGA
GATCGAGACCATCCTGGCTAACACGGTGAAACCCCATCTCTACTGAAAATACAAAAAAATTTGC
CGGGCGTGATGGCGGGCACCTGTAGTCCCAGCTACTCGGGAGGCTGAGGCAGGAGGATGGTGTG
AACCCCGGAGGCAGAGCTTGCAGTGAGTCAAGATCGTGCCACTGCACTCCAACCTGGGCGACAG
AATGAGACTCCATCTCAAACAAAAAAACAAAACAAAACAAAAAAAAGTGTAATAATAATTTATC
ATTAGCTGGATGATATGCTGTTGTTTCCCATGTCACCTGTATAAGATATGTAAAATAAGAACAC
ATTATTTACATCTAATATAGATAAAATCCTGAGGCGCTCTCAGATTGTTTTGTAGAGTTCAAAT
GTAAATATTGTTTTCATTTATGGTCCTTTTGGTTATAAGTAACAGAAATCAACTCTAAAAAGAT
TTTTATTATAGGTTAGATTATGTCATGGAACCTTAAGGCTTGTCCCTTTCTAGTTCTTTTGTGT
AAAGCGGTGATTTCTTCCATGGAGGGAATGGTATTTAGGCAATTTTTTTTTTTTTTTCGAGATG
GAGTCTTGCTCTGTCGCTCAGGCTGGAGTGCAGTGGCACCATTTCAGCTCACTGCAACTTCCAC
CTCCTGGGTTCAAGTGATTCTCCTGCTTCAGCCTCCCAAGTAGCTGAGATTACAGGCACCCGCC
ACCACACCCGGCTTATTTTGTATTTTTAGTAGAGATGGGGTTTCACCATGTTGGCCAGGCTGGT
CTTGAACTCCTGACCTCAAGTGATCTCCCCACCTTGGCCTTCCAAAGTGCTAGGATTACAGGCG
CCTAGCCTAGGCAGTCATTTTCAAAAAACAAGCATGACTCACCAAAAGTTTTAAGATTTTCTGT
GATAATGTTCTTATTGAGGCTTACATTATATTACAGTTTCTTGAATCTAAAATGATGTACCCTC
TTAGAATATATACATCATGCTTCATTGGTCTCAGGGGGCTGATTTTTATAAGGAGAGATTTGCT
AGTTTTCACAATATGTCCTCTAAGTTGGCATGTATAGCTAAACAGGCTTTCATAAAAATATACA
ATTTAGTTAATGAAATTTGGGATATAGTCTTTTATGATTGAAATAATTTTGCTAAATAGACTGT
CTCTGATTTATTAGGTAATCACCACTCTTATTTTGTTTTACTTCCTTAATGTCTACATAGAAAG
GAAATGAGAAAAATCCAGAGGTTGTCATTTGACTTATGAGTCTGTTTGACTTCAGGATTTGGTA
CATGAAATTTCACTTAATCTTTTTGATATGTATAAAACAAATATTCTGGGTAATTATTTTTATC
CTTTTGGTTTTGAGTCCTTTTTATTCCTATCATATTGAAATTGGTAAGTTAATTTTCCTTTGAA
ATATTCCTTATAGCCAGGTCTAAAATTCAATGGCCCACCACCGCCACCGCCACCACCACCACCC
CACTTACTATCATGCTGGCTGCCTCCATTTCCTTCTGGACCACCAGTAAGTAAAAAAGAGTATA
GGTTAGATTTTGCTTTCACATACAATTTGATAATTAGCAGAATAGAGGATTGTAAAATGTCATT
GTAGAACATCCCTTGGGCCAGATTCTAATGGGTAGAAATTTGAACTAAACCTCTGGGTTTTGTT
TGTTTTTAATGCCTTTCTGTTACCCAGATGCAGTGCTCTTGTAGTCCCAAGTCTAAGCTCTAGG
TTGCCTTCTTTCCTGGCAGAAGTTGGTGTCTATGCCATAAGGAGGTAGTTCCTGTTAGAAGGGA
TTTAATTATACCTTATATAAGGAATTAGTGTTTGCCCTTCTAGGTATAGTTGGATGTTAGCTTC
TGATGTAAACTGGATTTCTTTTTCTTTCTCTCTCTTTTTTTTTTTTTGTTTTGGAGGCAGAGTT
TTGCCCTTGTACCCCAGGCTGGAGTGCAGTGGTGTGATCTCAGCTCACAGCAACCTCCGCCTCC
TGGGTTCAAGCAATTCTGCCTCGGCCTCCCAAGTAGCTGGGATTACAGGCGACTGCCACCACAC
CCGGCTAATTTTTGTTTTATTAGTAGAGATGGGGTTTCACCATGTTGGCCAGACTGATCTTGAA
CTCCTGACCTCAGGTGATCCACCCGCCTTGGCCTCCCAAAGCGCTGGGATTACAGGCGTGAGCT
GCCGCACCCAGCTGTAAACTGGATTTCTAATGGTAGATTTTTAGGTATTAACAATAGATAAAAA
GATACTTTTTGGCATACTGTGTATTGGGATGGGGTTAGAACAGGTGTTCTACCCAAGACATTTA
CTTAAAATCGCCCTCGAAATGCTATGTGAGCTGTGTGTGTGTGTGTGTGTGTGTGTGTATTAAG
GAAAAGCATGAAAGTATTTATGCTTGATTTTTTTTTTTTACTCATAGCTTCATAGTGGAACAGA
TACATAGTCTAAATCAAAATGTTTAAACTTTTTATGTCACTTGCTGTCTTTTCGTCCTCGTTAA
ATTTAATTTTGTTGGTCTTTTGTTGTTATTGGTTGGTTTTCTCCAAATGCTAGCTATGTTAAGA
AATTTAAGGCCAGGTACAGTGGCTCATGCCTGTAATCCCGGCATTTTAGAAGGCTGAGGCAGGA
GGATCACTTGAGCTCAGGAGTTTGAGACCAGTCTGGGCAACATAGCAAGACCTCGTCTTTGTTT
AGGGGAAAAAAAAGAAATTTAAGTAGGAGATTATATAAGCAAAAATACAATTAATTTCCAGCAT
TCACTATATAATATAAATCTCCAGACTTTACTTTTTTGTTTACTGGATATAAACAATATCTTTT
TCTGTCTCCAGATAATTCCCCCACCACCTCCCATATGTCCAGATTCTCTTGATGATGCTGATGC
TTTGGGAAGTATGTTAATTTCATGGTACATGAGTGGCTATCATACTGGCTATTATATGGTAAGT
AATCACTCAGCATCTTTTCCTGACAATTTTTTTGTAGTTATGTGACTTTGTTTTGTAAATTTAT
AAAATACTACTTGCTTCTCTCTTTATATTACTAAAAAATAAAAATAAAAAAATACAACTGTCTG
AGGCTTAAATTACTCTTGCATTGTCCCTAAGTATAATTTTAGTTAATTTTAAAAAGCTTTCATG
CTATTGTTAGATTATTTTGATTATACACTTTTGAATTGAAATTATACTTTTTCTAAATAATGTT
TTAATCTCTGATTTGAAATTGATTGTAGGGAATGGAAAAGATGGGATAATTTTTCATAAATGAA
AAATGAAATTCTTTTTTTTTTTTTTTTTTTTTTGAGACGGAGTCTTGCTCTGTTGCCCAGGCTG
GAGTGCAATGGCGTGATCTTGGCTCACAGCAAGCTCTGCCTCCTGGATTCACGCCATTCTCCTG
CCTCAGCCTCAGAGGTAGCTGGGACTACAGGTGCCTGCCACCACGCCTGTCTAATTTTTTGTAT
TTTTTTGTAAAGACAGGGTTTCACTGTGTTAGCCAGGATGGTCTCAATCTCCTGACCCCGTGAT
CCACCCGCCTCGGCCTTCCAAGAGAAATGAAATTTTTTTAATGCACAAAGATCTGGGGTAATGT
GTACCACATTGAACCTTGGGGAGTATGGCTTCAAACTTGTCACTTTATACGTTAGTCTCCTACG
GACATGTTCTATTGTATTTTAGTCAGAACATTTAAAATTATTTTATTTTATTTTATTTTTTTTT
TTTTTTTGAGACGGAGTCTCGCTCTGTCACCCAGGCTGGAGTACAGTGGCGCAGTCTCGGCTCA
CTGCAAGCTCCGCCTCCCGGGTTCACGCCATTCTCCTGCCTCAGCCTCTCCGAGTAGCTGGGAC
TACAGGCGCCCGCCACCACGCCCGGCTAATTTTTTTTTATTTTTAGTAGAGACGGGGTTTCACC
GTGGTCTCGATCTCCTGACCTCGTGATCCACCCGCCTCGGCCTCCCAAAGTGCTGGGATTACAA
GCGTGAGCCACCGCGCCCGGCCTAAAATTATTTTTAAAAGTAAGCTCTTGTGCCCTGCTAAAAT
TATGATGTGATATTGTAGGCACTTGTATTTTTAGTAAATTAATATAGAAGAAACAACTGACTTA
AAGGTGTATGTTTTTAAATGTATCATCTGTGTGTGCCCCCATTAATATTCTTATTTAAAAGTTA
AGGCCAGACATGGTGGCTTACAACTGTAATCCCAACAGTTTGTGAGGCCGAGGCAGGCAGATCA
CTTGAGGTCAGGAGTTTGAGACCAGCCTGGCCAACATGATGAAACCTTGTCTCTACTAAAAATA
CCAAAAAAAATTTAGCCAGGCATGGTGGCACATGCCTGTAATCCGAGCTACTTGGGAGGCTGTG
GCAGGAAAATTGCTTTAATCTGGGAGGCAGAGGTTGCAGTGAGTTGAGATTGTGCCACTGCACT
CCACCCTTGGTGACAGAGTGAGATTCCATCTCAAAAAAAGAAAAAGGCCTGGCACGGTGGCTCA
CACCTATAATCCCAGTACTTTGGGAGGTAGAGGCAGGTGGATCACTTGAGGTTAGGAGTTCAGG
ACCAGCCTGGCCAACATGGTGACTACTCCATTTCTACTAAATACACAAAACTTAGCCCAGTGGC
GGGCAGTTGTAATCCCAGCTACTTGAGAGGTTGAGGCAGGAGAATCACTTGAACCTGGGAGGCA
GAGGTTGCAGTGAGCCGAGATCACACCGCTGCACTCTAGCCTGGCCAACAGAGTGAGAATTTGC
GGAGGGAAAAAAAAGTCACGCTTCAGTTGTTGTAGTATAACCTTGGTATATTGTATGTATCATG
AATTCCTCATTTTAATGACCAAAAAGTAATAAATCAACAGCTTGTAATTTGTTTTGAGATCAGT
TATCTGACTGTAACACTGTAGGCTTTTGTGTTTTTTAAATTATGAAATATTTGAAAAAAATACA
TAATGTATATATAAAGTATTGGTATAATTTATGTTCTAAATAACTTTCTTGAGAAATAATTCAC
ATGGTGTGCAGTTTACCTTTGAAAGTATACAAGTTGGCTGGGCACAATGGCTCACGCCTGTAAT
CCCAGCACTTTGGGAGGCCAGGGCAGGTGGATCACGAGGTCAGGAGATCGAGACCATCCTGGCT
AACATGGTGAAACCCCGTCTCTACTAAAAGTACAAAAACAAATTAGCCGGGCATGTTGGCGGGC
ACCTTTTGTCCCAGCTGCTCGGGAGGCTGAGGCAGGAGAGTGGCGTGAACCCAGGAGGTGGAGC
TTGCAGTGAGCCGAGATTGTGCCAGTGCACTCCAGCCTGGGCGACAGAGCGAGACTCTGTCTCA
AAAAATAAAATAAAAAAGAAAGTATACAAGTCAGTGGTTTTGGTTTTCAGTTATGCAACCATCA
CTACAATTTAAGAACATTTTCATCACCCCAAAAAGAAACCCTGTTACCTTCATTTTCCCCAGCC
CTAGGCAGTCAGTACACTTTCTGTCTCTATGAATTTGTCTATTTTAGATATTATATATAAACGG
AATTATACGATATGTGGTCTTTTGTGTCTGGCTTCTTTCACTTAGCATGCTATTTTCAAGATTC
ATCCATGCTGTAGAATGCACCAGTACTGCATTCCTTCTTATTGCTGAATATTCTGTTGTTTGGT
TATATCACATTTTATCCATTCATCAGTTCATGGACATTTAGGTTGTTTTTATTTTTGGGCTATA
ATGAATAATGTTGCTATGAACATTCGTTTGTGTTCTTTTTGTTTTTTTGGTTTTTTGGGTTTTT
TTTGTTTTGTTTTTGTTTTTGAGACAGTCTTGCTCTGTCTCCTAAGCTGGAGTGCAGTGGCATG
ATCTTGGCTTACTGCAAGCTCTGCCTCCCGGGTTCACACCATTCTCCTGCCTCAGCCCGACAAG
TAGCTGGGACTACAGGCGTGTGCCACCATGCACGGCTAATTTTTTGTATTTTTAGTAGAGATGG
GGTTTCACCGTGTTAGCCAGGATGGTCTCGATCTCCTGACCTCGTGATCTGCCTGCCTAGGCCT
CCCAAAGTGCTGGGATTACAGGCGTGAGCCACTGCACCTGGCCTTAAGTGTTTTTAATACGTCA
TTGCCTTAAGCTAACAATTCTTAACCTTTGTTCTACTGAAGCCACGTGGTTGAGATAGGCTCTG
AGTCTAGCTTTTAACCTCTATCTTTTTGTCTTAGAAATCTAAGCAGAATGCAAATGACTAAGAA
TAATGTTGTTGAAATAACATAAAATAGGTTATAACTTTGATACTCATTAGTAACAAATCTTTCA
ATACATCTTACGGTCTGTTAGGTGTAGATTAGTAATGAAGTGGGAAGCCACTGCAAGCTAGTAT
ACATGTAGGGAAAGATAGAAAGCATTGAAGCCAGAAGAGAGACAGAGGACATTTGGGCTAGATC
TGACAAGAAAAACAAATGTTTTAGTATTAATTTTTGACTTTAAATTTTTTTTTTATTTAGTGAA
TACTGGTGTTTAATGGTCTCATTTTAATAAGTATGACACAGGTAGTTTAAGGTCATATATTTTA
TTTGATGAAAATAAGGTATAGGCCGGGCACGGTGGCTCACACCTGTAATCCCAGCACTTTGGGA
GGCCGAGGCAGGCGGATCACCTGAGGTCGGGAGTTAGAGACTAGCCTCAACATGGAGAAACCCC
GTCTCTACTAAAAAAAATACAAAATTAGGCGGGCGTGGTGGTGCATGCCTGTAATCCCAGCTAC
TCAGGAGGCTGAGGCAGGAGAATTGCTTGAACCTGGGAGGTGGAGGTTGCGGTGAGCCGAGATC
ACCTCATTGCACTCCAGCCTGGGCAACAAGAGCAAAACTCCATCTCAAAAAAAAAAAAATAAGG
TATAAGCGGGCTCAGGAACATCATTGGACATACTGAAAGAAGAAAAATCAGCTGGGCGCAGTGG
CTCACGCCGGTAATCCCAACACTTTGGGAGGCCAAGGCAGGCGAATCACCTGAAGTCGGGAGTT
CCAGATCAGCCTGACCAACATGGAGAAACCCTGTCTCTACTAAAAATACAAAACTAGCCGGGCA
TGGTGGCGCATGCCTGTAATCCCAGCTACTTGGGAGGCTGAGGCAGGAGAATTGCTTGAACCGA
GAAGGCGGAGGTTGCGGTGAGCCAAGATTGCACCATTGCACTCCAGCCTGGGCAACAAGAGCGA
AACTCCGTCTCAAAAAAAAAAGGAAGAAAAATATTTTTTTAAATTAATTAGTTTATTTATTTTT
TAAGATGGAGTTTTGCCCTGTCACCCAGGCTGGGGTGCAATGGTGCAATCTCGGCTCACTGCAA
CCTCCGCCTCCTGGGTTCAAGTGATTCTCCTGCCTCAGCTTCCCGAGTAGCTGTGATTACAGCC
ATATGCCACCACGCCCAGCCAGTTTTGTGTTTTGTTTTGTTTTTTGTTTTTTTTTTTTGAGAGG
GTGTCTTGCTCTGTCCCCCAAGCTGGAGTGCAGCGGCGCGATCTTGGCTCACTGCAAGCTCTGC
CTCCCAGGTTCACACCATTCTCTTGCCTCAGCCTCCCGAGTAGCTGGGACTACAGGTGCCCGCC
ACCACACCCGGCTAATTTTTTTGTGTTTTTAGTAGAGATGGGGTTTCACTGTGTTAGCCAGGAT
GGTCTCGATCTCCTGACCTTTTGATCCACCCGCCTCAGCCTCCCCAAGTGCTGGGATTATAGGC
GTGAGCCACTGTGCCCGGCCTAGTCTTGTATTTTTAGTAGAGTCGGGATTTCTCCATGTTGGTC
AGGCTGTTCTCCAAATCCGACCTCAGGTGATCCGCCCGCCTTGGCCTCCAAAAGTGCAAGGCAA
GGCATTACAGGCATGAGCCACTGTGACCGGCAATGTTTTTAAATTTTTTACATTTAAATTTTAT
TTTTTAGAGACCAGGTCTCACTCTATTGCTCAGGCTGGAGTGCAAGGGCACATTCACAGCTCAC
TGCAGCCTTGACCTCCAGGGCTCAAGCAGTCCTCTCACCTCAGTTTCCCGAGTAGCTGGGACTA
CAGTGATAATGCCACTGCACCTGGCTAATTTTTATTTTTATTTATTTATTTTTTTTTGAGACAG
AGTCTTGCTCTGTCACCCAGGCTGGAGTGCAGTGGTGTAAATCTCAGCTCACTGCAGCCTCCGC
CTCCTGGGTTCAAGTGATTCTCCTGCCTCAACCTCCCAAGTAGCTGGGATTAGAGGTCCCCACC
ACCATGCCTGGCTAATTTTTTGTACTTTCAGTAGAAACGGGGTTTTGCCATGTTGGCCAGGCTG
TTCTCGAACTCCTGAGCTCAGGTGATCCAACTGTCTCGGCCTCCCAAAGTGCTGGGATTACAGG
CGTGAGCCACTGTGCCTAGCCTGAGCCACCACGCCGGCCTAATTTTTAAATTTTTTGTAGAGAC
AGGGTCTCATTATGTTGCCCAGGGTGGTGTCAAGCTCCAGGTCTCAAGTGATCCCCCTACCTCC
GCCTCCCAAAGTTGTGGGATTGTAGGCATGAGCCACTGCAAGAAAACCTTAACTGCAGCCTAAT
AATTGTTTTCTTTGGGATAACTTTTAAAGTACATTAAAAGACTATCAACTTAATTTCTGATCAT
ATTTTGTTGAATAAAATAAGTAAAATGTCTTGTGAAACAAAATGCTTTTTAACATCCATATAAA
GCTATCTATATATAGCTATCTATATCTATATAGCTATTTTTTTTAACTTCCTTTATTTTCCTTA
CAGGGTTTTAGACAAAATCAAAAAGAAGGAAGGTGCTCACATTCCTTAAATTAAGGAGTAAGTC
TGCCAGCATTATGAAAGTGAATCTTACTTTTGTAAAACTTTATGGTTTGTGGAAAACAAATGTT
TTTGAACATTTAAAAAGTTCAGATGTTAGAAAGTTGAAAGGTTAATGTAAAACAATCAATATTA
AAGAATTTTGATGCCAAAACTATTAGATAAAAGGTTAATCTACATCCCTACTAGAATTCTCATA
CTTAACTGGTTGGTTGTGTGGAAGAAACATACTTTCACAATAAAGAGCTTTAGGATATGATGCC
ATTTTATATCACTAGTAGGCAGACCAGCAGACTTTTTTTTATTGTGATATGGGATAACCTAGGC
ATACTGCACTGTACACTCTGACATATGAAGTGCTCTAGTCAAGTTTAACTGGTGTCCACAGAGG
ACATGGTTTAACTGGAATTCGTCAAGCCTCTGGTTCTAATTTCTCATTTGCAGGAAATGCTGGC
ATAGAGCAGCACTAAATGACACCACTAAAGAAACGATCAGACAGATCTGGAATGTGAAGCGTTA
TAGAAGATAACTGGCCTCATTTCTTCAAAATATCAAGTGTTGGGAAAGAAAAAAGGAAGTGGAA
TGGGTAACTCTTCTTGATTAAAAGTTATGTAATAACCAAATGCAATGTGAAATATTTTACTGGA
CTCTATTTTGAAAAACCATCTGTAAAAGACTGAGGTGGGGGTGGGAGGCCAGCACGGTGGTGAG
GCAGTTGAGAAAATTTGAATGTGGATTAGATTTTGAATGATATTGGATAATTATTGGTAATTTT
ATGAGCTGTGAGAAGGGTGTTGTAGTTTATAAAAGACTGTCTTAATTTGCATACTTAAGCATTT
AGGAATGAAGTGTTAGAGTGTCTTAAAATGTTTCAAATGGTTTAACAAAATGTATGTGAGGCGT
ATGTGGCAAAATGTTACAGAATCTAACTGGTGGACATGGCTGTTCATTGTACTGTTTTTTTCTA
TCTTCTATATGTTTAAAAGTATATAATAAAAATATTTAATTTTTTTTTAAATTAGCTGTATCTG
TGATTGTATTTCTTTTTTGCATATTATTTTGCCCTTTGGCCCATATTTTGATATGGATGCCACC
ATAGCATTTTGTGTATGTGCATGTGTATTCCCACTTAATGTCACATTTTTCATGTCTTTACATA
TTCTTATTTTTGTTTGTTTTTGAGACAGAGTCTCGCTCTGCTGCCCACGCTGGAGTGCAGTGGT
GCAATCTCAGCTCACTGCAACCTCTGCTATCCGGGTTCAAGCAGTTCTCGTGCCTCACCCACGT
GAGTAGTTGGGATTACAGGCATGTGGCACCATGCCCCACTAAGTTTTGTATTTTTAGTAGAGAT
GGAGTTTCACCATGTTGGCCAGGCTGGTCTCAAACTCCTGCCCTCAAGTGATTCGACCACCCTG
GCCTCCCAAAGTGCTGGGATTACAGCCGTGAGCCACCGCACACGGCCTCTCTATTTATTTCTAT
ACATAGCTTTTCACATTATATTATGTTTATATATTGTTTATATCTGTATTTCCTCTTTCATTAG
AGAAAAGGTAGTACATCTTATTCTTCATGGTGTCTACAATATCTGGCAGTTTTTGGAAGTCAAG
CGTGAGCTTAGAGCATAGACTGGTGGGATTGTCAAAGAAGAGGGCAACTGGAAGAGAACTGTCA
GTTATTTTTGGATCAGTCTTTAATTCATCATGACGGGTTAGGCATTAGTTGTATTTCTTGCTAA
TTTTGAAGAAGACTTATTAACAAATCCTACATTAGGTAAATGGTTTTGAAAGTTGAGTTAATCA
TAATGGTGTTTGACCTAGGACTATTTTTAGGCCCTATTTATCTTAATATCGAATAATGAAGCAG
CTTCCCCCTTAGATATAGACAGAAAACATCAAAGCCACCACACTACCTGGCTGGATTTATCCTA
GTAATAAAATCAAAACTGAGC.

[0052] In embodiments, the Exons of each of the SMN1 and SMN2 polynucleotides differ only by an alteration(s) in Exon 7 (see Gladman, et al., “A humanized Smn gene containing the SMN2 nucleotide alteration in Exon 7 mimics SMN2 splicing and the SMA disease phenotype,” Human Molecular Genetics, 19:4239-4252 (2010), the disclosure of which is incorporated herein in its entirety for all purposes). In embodiments, the alteration is a C>T nucleotide transition(s) in Exon 7 of an SMN2 polynucleotide relative to Exon 7 of an SMN1 polynucleotide, optionally where the alteration is associated with spinal muscular atrophy (SMA).

[0053] The term “about” or “approximately” means within an acceptable error range for the particular value as determined by one of ordinary skill in the art, which will depend in part on how the value is measured or determined, i.e., the limitations of the measurement system.

[0054] By “adenine” or “9H-Purin-6-amine” is meant a purine nucleobase with the molecular formula C₅H₅N₅, having the structure

[chemical structure]

and corresponding to CAS No. 73-24-5.

[0055] By “adenosine” or “4-Amino-1-[(2R,3R,4S,5R)-3,4-dihydroxy-5-(hydroxymethyl)oxolan-2-yl]pyrimidin-2(1H)-one” is meant an adenine molecule attached to a ribose sugar via a glycosidic bond, having the structure

[chemical structure]

and corresponding to CAS No. 65-46-3. Its molecular formula is C₁₀H₁₃N₅O₄.

[0056] By “adenosine deaminase” or “adenine deaminase” is meant a polypeptide or fragment thereof capable of catalyzing the hydrolytic deamination of adenine or adenosine. In some embodiments, the deaminase or deaminase domain is an adenosine deaminase catalyzing the hydrolytic deamination of adenosine to inosine or deoxy adenosine to deoxyinosine. In some embodiments, the adenosine deaminase catalyzes the hydrolytic deamination of adenine or adenosine in deoxyribonucleic acid (DNA). The adenosine deaminases (e.g., engineered adenosine deaminases, evolved adenosine deaminases) provided herein may be from any organism (e.g., eukaryotic, prokaryotic), including but not limited to algae, bacteria, fungi, plants, invertebrates (e.g., insects), and vertebrates (e.g., amphibians, mammals). In some embodiments, the adenosine deaminase is an adenosine deaminase variant with one or more alterations and is capable of deaminating both adenine and cytosine in a target polynucleotide (e.g., DNA, RNA) and may be referred to as a “dual deaminase”. Non-limiting examples of dual deaminases include those described in PCT/US22/22050. In some embodiments, the target polynucleotide is single or double stranded. In some embodiments, the adenosine deaminase variant is capable of deaminating both adenine and cytosine in DNA. In some embodiments, the adenosine deaminase variant is capable of deaminating both adenine and cytosine in single-stranded DNA. In some embodiments, the adenosine deaminase variant is capable of deaminating both adenine and cytosine in RNA. In embodiments, the adenosine deaminase variant is selected from those described in PCT/US2020/018192, PCT/US2020/049975, and PCT/US2017/045381.

[0057] By “adenosine deaminase activity” is meant catalyzing the deamination of adenine or adenosine to guanine in a polynucleotide. In some embodiments, an adenosine deaminase variant as provided herein maintains adenosine deaminase activity (e.g., at least about 30%, 40%, 50%, 60%, 70%, 80%, 90% or more of the activity of a reference adenosine deaminase (e.g., TadA*8.20 or TadA*8.19)).

[0058] By “Adenosine Base Editor (ABE)” is meant a base editor comprising an adenosine deaminase.

[0059] By “Adenosine Base Editor (ABE) polynucleotide” is meant a polynucleotide encoding an ABE.

[0060] By “Adenosine Base Editor 8 (ABE8) polypeptide” or “ABE8” is meant a base editor as defined herein comprising an adenosine deaminase or adenosine deaminase variant comprising one or more of the alterations listed in Table 15, one of the combinations of alterations listed in Table 15, or an alteration at one or more of the amino acid positions listed in Table 15, such alterations are relative to the following reference sequence: MSEVEFSHEYWMRHALTLAKRARDEREVPVGAVLVLNNRVIGEGWNRAIGLHDPTAHAEIMALR QGGLVMQNYRLIDATLYVTFEPCVMCAGAMIHSRIGRVVFGVRNAKTGAAGSLMDVLHYPGMNH RVEITEGILADECAALLCYFFRMPRQVFNAQKKAQSSTD (SEQ ID NO: 1), or a corresponding position in another adenosine deaminase. In embodiments, ABE8 comprises alterations at amino acids 82 and/or 166 of SEQ ID NO: 1 In some embodiments, ABE8 comprises further alterations, as described herein, relative to the reference sequence.

[0061] By “Adenosine Base Editor 8 (ABE8) polynucleotide” is meant a polynucleotide encoding an ABE8 polypeptide.

[0062] “Administering” is referred to herein as providing one or more compositions described herein to a patient or a subject. By way of example and without limitation, composition administration (e.g., injection) can be performed by intravenous (i.v.) injection, sub-cutaneous (s.c.) injection, intradermal (i.d.) injection, intraperitoneal (i.p.) injection, or intramuscular (i.m.) injection. One or more such routes can be employed. Parenteral administration can be, for example, by bolus injection or by gradual perfusion over time. In some embodiments, parenteral administration includes infusing or injecting intravascularly, intravenously, intramuscularly, intraarterially, intrathecally, intratumorally, intradermally, intraperitoneally, transtracheally, subcutaneously, subcuticularly, intraarticularly, subcapsularly, subarachnoidly and intrasternally. Alternatively, or concurrently, administration can be by the oral route.

[0063] By “agent” is meant any small molecule chemical compound, antibody, nucleic acid molecule, or polypeptide, or fragments thereof.

[0064] By “alteration” is meant a change in the level, structure, or activity of an analyte, gene or polypeptide as detected by standard art known methods such as those described herein. As used herein, an alteration includes a change (e.g., increase or decrease) in expression levels. In embodiments, the increase or decrease in expression levels is by 10% 10%, 25%, 40%, 50% or greater. In some embodiments, an alteration includes an insertion, deletion, or substitution of a nucleobase or amino acid (by, e.g., genetic engineering).

[0065] By “ameliorate” is meant decrease, suppress, attenuate, diminish, arrest, or stabilize the development or progression of a disease. In an embodiment, the disease is SMA.

[0066] By “analog” is meant a molecule that is not identical but has analogous functional or structural features. For example, a polypeptide analog retains the biological activity of a corresponding naturally-occurring polypeptide, while having certain biochemical modifications that enhance the analog's function relative to a naturally occurring polypeptide. Such biochemical modifications could increase the analog's protease resistance, membrane permeability, or half-life, without altering, for example, ligand binding. An analog may include an unnatural amino acid.

[0067] By “base editor (BE),” or “nucleobase editor polypeptide (NBE)” is meant an agent that binds a polynucleotide and has nucleobase modifying activity. In various embodiments, the base editor comprises a nucleobase modifying polypeptide (e.g., a deaminase) and a polynucleotide programmable nucleotide binding domain (e.g., Cas9 or Cpf1) in conjunction with a guide polynucleotide (e.g., guide RNA (gRNA)). Representative nucleic acid and protein sequences of base editors include those sequences with about or at least about 85% sequence identity to any base editor sequence provided in the sequence listing, such as those corresponding to SEQ ID NOs: 2-11.

[0068] By “BE4 cytidine deaminase (BE4) polypeptide,” is meant a base editor comprising a nucleic acid programmable DNA binding protein (napDNAbp) domain, a cytidine deaminase domain, and two uracil glycosylase inhibitor domains (UGIs). In embodiments, the napDNAbp is a Cas9n(D10A) polypeptide. Non-limiting examples of cytidine deaminase domains include rAPOBEC, ppAPOBEC, RrA3F, AmAPOBECI, and SsAPOBEC3B.

[0069] By “BE4 cytidine deaminase (BE4) polynucleotide,” is meant a polynucleotide encoding a BE4 polypeptide.

[0070] By “base editing activity” is meant acting to chemically alter a base within a polynucleotide. In one embodiment, a first base is converted to a second base. In one embodiment, the base editing activity is cytidine deaminase activity, e.g., converting target C•G to T•A. In another embodiment, the base editing activity is adenosine or adenine deaminase activity, e.g., converting A•T to G•C.

[0071] The term “base editor system” refers to an intermolecular complex for editing a nucleobase of a target nucleotide sequence. In various embodiments, the base editor (BE) system comprises (1) a polynucleotide programmable nucleotide binding domain, a deaminase domain (e.g., cytidine deaminase or adenosine deaminase) for deaminating nucleobases in the target nucleotide sequence; and (2) one or more guide polynucleotides (e.g., guide RNA) in conjunction with the polynucleotide programmable nucleotide binding domain. In various embodiments, the base editor (BE) system comprises a nucleobase editor domain selected from an adenosine deaminase or a cytidine deaminase, and a domain having nucleic acid sequence specific binding activity. In some embodiments, the base editor system comprises (1) a base editor (BE) comprising a polynucleotide programmable DNA binding domain and a deaminase domain for deaminating one or more nucleobases in a target nucleotide sequence; and (2) one or more guide RNAs in conjunction with the polynucleotide programmable DNA binding domain. In some embodiments, the polynucleotide programmable nucleotide binding domain is a polynucleotide programmable DNA binding domain. In some embodiments, the base editor is a cytidine base editor (CBE). In some embodiments, the base editor is an adenine or adenosine base editor (ABE). In some embodiments, the base editor is an adenine or adenosine base editor (ABE) or a cytidine or cytosine base editor (CBE). In some embodiments, the base editor system (e.g., a base editor system comprising a cytidine deaminase) comprises a uracil glycosylase inhibitor or other agent or peptide (e.g., a uracil stabilizing protein such as provided in WO2022015969, the disclosure of which is incorporated herein by reference in its entirety for all purposes) that inhibits the inosine base excision repair system.

[0072] The term “Cas9” or “Cas9 domain” refers to an RNA guided nuclease comprising a Cas9 protein, or a fragment thereof (e.g., a protein comprising an active, inactive, or partially active DNA cleavage domain of Cas9, and/or the gRNA binding domain of Cas9). A Cas9 nuclease is also referred to sometimes as a casn1 nuclease or a CRISPR (clustered regularly interspaced short palindromic repeat) associated nuclease.

[0073] The term “conservative amino acid substitution” or “conservative mutation” refers to the replacement of one amino acid by another amino acid with a common property. A functional way to define common properties between individual amino acids is to analyze the normalized frequencies of amino acid changes between corresponding proteins of homologous organisms (Schulz, G. E. and Schirmer, R. H., Principles of Protein Structure, Springer-Verlag, New York (1979)). According to such analyses, groups of amino acids can be defined where amino acids within a group exchange preferentially with each other, and therefore resemble each other most in their impact on the overall protein structure (Schulz, G. E. and Schirmer, R. H., supra). Non-limiting examples of conservative mutations include amino acid substitutions of amino acids, for example, lysine for arginine and vice versa such that a positive charge can be maintained; glutamic acid for aspartic acid and vice versa such that a negative charge can be maintained; serine for threonine such that a free —OH can be maintained; and glutamine for asparagine such that a free —NH₂ can be maintained.

[0074] The term “coding sequence” or “protein coding sequence” as used interchangeably herein refers to a segment of a polynucleotide that codes for a protein. Coding sequences can also be referred to as open reading frames. The region or sequence is bounded nearer the 5′ end by a start codon and nearer the 3′ end with a stop codon. Stop codons useful with the base editors described herein include the following:

| | |
|---|---|
| Glutamine | CAG → TAG Stop codon |
| | CAA → TAA |
| Arginine | CGA → TGA |
| Tryptophan | TGG → TGA |
| | TGG → TAG |
| | TGG → TAA |

[0075] By “complex” is meant a combination of two or more molecules whose interaction relies on inter-molecular forces. Non-limiting examples of inter-molecular forces include covalent and non-covalent interactions. Non-limiting examples of non-covalent interactions include hydrogen bonding, ionic bonding, halogen bonding, hydrophobic bonding, van der Waals interactions (e.g., dipole-dipole interactions, dipole-induced dipole interactions, and London dispersion forces), and π-effects. In an embodiment, a complex comprises polypeptides, polynucleotides, or a combination of one or more polypeptides and one or more polynucleotides. In one embodiment, a complex comprises one or more polypeptides that associate to form a base editor (e.g., base editor comprising a nucleic acid programmable DNA binding protein, such as Cas9, and a deaminase) and a polynucleotide (e.g., a guide RNA). In an embodiment, the complex is held together by hydrogen bonds. It should be appreciated that one or more components of a base editor (e.g., a deaminase, or a nucleic acid programmable DNA binding protein) may associate covalently or non-covalently. As one example, a base editor may include a deaminase covalently linked to a nucleic acid programmable DNA binding protein (e.g., by a peptide bond). Alternatively, a base editor may include a deaminase and a nucleic acid programmable DNA binding protein that associate noncovalently (e.g., where one or more components of the base editor are supplied in trans and associate directly or via another molecule such as a protein or nucleic acid). In an embodiment, one or more components of the complex are held together by hydrogen bonds.

[0076] By “cytosine” or “4-Aminopyrimidin-2(1H)-one” is meant a purine nucleobase with the molecular formula C₄H₅N₃O, having the structure

[chemical structure]

and corresponding to CAS No. 71-30-7.

[0077] By “cytidine” is meant a cytosine molecule attached to a ribose sugar via a glycosidic bond, having the structure

[chemical structure]

and corresponding to CAS No. 65-46-3. Its molecular formula is C₉H₁₃N₃O₅.

[0078] By “Cytidine Base Editor (CBE)” is meant a base editor comprising a cytidine deaminase.

[0079] By “Cytidine Base Editor (CBE) polynucleotide” is meant a polynucleotide encoding a CBE.

[0080] By “cytidine deaminase” or “cytosine deaminase” is meant a polypeptide or fragment thereof capable of deaminating cytidine or cytosine. In embodiments, the cytidine or cytosine is present in a polynucleotide. In one embodiment, the cytidine deaminase converts cytosine to uracil or 5-methylcytosine to thymine. The terms “cytidine deaminase” and “cytosine deaminase” are used interchangeably throughout the application. Petromyzon marinus cytosine deaminase 1 (PmCDA1) (SEQ ID NO: 13-14), Activation-induced cytidine deaminase (AICDA) (SEQ ID NOs: 15-21), and APOBEC (SEQ ID NOs: 12-61) are exemplary cytidine deaminases. Further exemplary cytidine deaminase (CDA) sequences are provided in the Sequence Listing as SEQ ID NOs: 62-66 and SEQ ID NOs: 67-189. Non-limiting examples of cytidine deaminases include those described in PCT/US20/16288, PCT/US2018/021878, 180802-021804/PCT, PCT/US2018/048969, and PCT/US2016/058344.

[0081] By “cytosine deaminase activity” is meant catalyzing the deamination of cytosine or cytidine. In one embodiment, a polypeptide having cytosine deaminase activity converts an amino group to a carbonyl group. In an embodiment, a cytosine deaminase converts cytosine to uracil (i.e., C to U) or 5-methylcytosine to thymine (i.e., 5mC to T). In some embodiments, a cytosine deaminase as provided herein has increased cytosine deaminase activity (e.g., at least 10-fold, 20-fold, 30-fold, 40-fold, 50-fold, 60-fold, 70-fold, 80-fold, 90-fold, 100-fold or more) relative to a reference cytosine deaminase.

[0082] The term “deaminase” or “deaminase domain,” as used herein, refers to a protein or fragment thereof that catalyzes a deamination reaction.

[0083] “Detect” refers to identifying the presence, absence, or amount of the analyte to be detected. In one embodiment, a sequence alteration in a polynucleotide or polypeptide is detected. In another embodiment, the presence of indels is detected.

[0084] By “detectable label” is meant a composition that when linked to a molecule of interest renders the latter detectable, via spectroscopic, photochemical, biochemical, immunochemical, or chemical means. For example, useful labels include radioactive isotopes, magnetic beads, metallic beads, colloidal particles, fluorescent dyes, electron-dense reagents, enzymes (for example, as commonly used in an enzyme linked immunosorbent assay (ELISA)), biotin, digoxigenin, or haptens.

[0085] By “disease” is meant any condition or disorder that damages or interferes with the normal function of a cell, tissue, or organ. Exemplary diseases include spinal muscular atrophy. In embodiments, the spinal muscular atrophy is type 0, type I, type II, type III, or type IV.

[0086] By “dual editing activity” or “dual deaminase activity” is meant having adenosine deaminase and cytidine deaminase activity. In one embodiment, a base editor having dual editing activity has both A→G and C→T activity, wherein the two activities are approximately equal or are within about 10% or 20% of each other. In another embodiment, a dual editor has A→G activity that no more than about 10% or 20% greater than C→T activity. In another embodiment, a dual editor has A→G activity that is no more than about 10% or 20% less than C→T activity. In some embodiments, the adenosine deaminase variant has predominantly cytosine deaminase activity, and little, if any, adenosine deaminase activity. In some embodiments, the adenosine deaminase variant has cytosine deaminase activity, and no significant or no detectable adenosine deaminase activity By “effective amount” is meant the amount of an agent or active compound, e.g., a base editor as described herein, that is required to ameliorate the symptoms of a disease relative to an untreated patient or an individual without disease, i.e., a healthy individual, or is the amount of the agent or active compound sufficient to elicit a desired biological response. The effective amount of active compound(s) used to practice the present invention for therapeutic treatment of a disease varies depending upon the manner of administration, the age, body weight, and general health of the subject. Ultimately, the attending physician or veterinarian will decide the appropriate amount and dosage regimen. Such amount is referred to as an “effective” amount. In one embodiment, an effective amount is the amount of a base editor of the invention sufficient to introduce an alteration in a gene of interest in a cell (e.g., a cell in vitro or in vivo). In one embodiment, an effective amount is the amount of a base editor required to achieve a therapeutic effect. Such therapeutic effect need not be sufficient to alter a pathogenic gene in all cells of a subject, tissue or organ, but only to alter the pathogenic gene in about 1%, 5%, 10%, 25%, 50%, 75% or more of the cells present in a subject, tissue or organ. In one embodiment, an effective amount is sufficient to ameliorate one or more symptoms of a disease. In an embodiment, an effective amount of a base editor system described herein is sufficient to increase expression of SMN2. In another embodiment, an effective amount of a base editor system described herein is sufficient to increase muscle function in a subject having SMA.

[0087] The term “endonuclease” refers to a protein or polypeptide capable of catalyzing the cleavage of internal regions in a polynucleotide.

[0088] By “fragment” is meant a portion of a polypeptide or nucleic acid molecule. This portion contains, at least about 10%, 20%, 30%, 40%, 50%, 60%, 70%, 80%, or 90% of the entire length of the reference nucleic acid molecule or polypeptide. A fragment may contain 10, 20, 30, 40, 50, 60, 70, 80, 90, or 100, 200, 300, 400, 500, 600, 700, 800, 900, or 1000 nucleotides or amino acids. In some embodiments, the fragment is a functional fragment.

[0089] By “gene” is meant a polynucleotide sequence that is transcribed as a single unit.

[0090] By “guide polynucleotide” is meant a polynucleotide or polynucleotide complex which is specific for a target sequence and can form a complex with a polynucleotide programmable nucleotide binding domain protein (e.g., Cas9 or Cpf1). In an embodiment, the guide polynucleotide is a guide RNA (gRNA). gRNAs can exist as a complex of two or more RNAs, or as a single RNA molecule.

[0091] By “heterologous,” or “exogenous” is meant a polynucleotide or polypeptide that 1) has been experimentally incorporated to a polynucleotide or polypeptide sequence to which the polynucleotide or polypeptide is not normally found in nature; or 2) has been experimentally placed into a cell that does not normally comprise the polynucleotide or polypeptide. In some embodiments, “heterologous” means that a polynucleotide or polypeptide has been experimentally placed into a non-native context. In some embodiments, a heterologous polynucleotide or polypeptide is derived from a first species or host organism and is incorporated into a polynucleotide or polypeptide derived from a second species or host organism. In some embodiments, the first species or host organism is different from the second species or host organism. In some embodiments the heterologous polynucleotide is DNA. In some embodiments the heterologous polynucleotide is RNA.

[0092] “Hybridization” means hydrogen bonding, which may be Watson-Crick, Hoogsteen or reversed Hoogsteen hydrogen bonding, between complementary nucleobases. For example, adenine and thymine are complementary nucleobases that pair through the formation of hydrogen bonds.

[0093] By “increases” is meant a positive alteration of at least 10%, 25%, 50%, 75%, or 100%, or about 1.5 fold, about 2 fold, about 3-fold, about 4-fold, about 5-fold, about 6-fold, about 7-fold, about 8-fold, about 9-fold, about 10-fold, about 15-fold, about 20-fold, about 25-fold, about 30-fold, about 35-fold, about 40-fold, about 45-fold, about 50-fold, or about 100-fold.

[0094] The terms “inhibitor of base repair”, “base repair inhibitor”, “IBR” or their grammatical equivalents refer to a protein that is capable in inhibiting the activity of a nucleic acid repair enzyme, for example a base excision repair enzyme.

[0095] An “intein” is a fragment of a protein that is able to excise itself and join the remaining fragments (the exteins) with a peptide bond in a process known as protein splicing.

[0096] The terms “isolated,” “purified,” or “biologically pure” refer to material that is free to varying degrees from components which normally accompany it as found in its native state. “Isolate” denotes a degree of separation from original source or surroundings. “Purify” denotes a degree of separation that is higher than isolation. A “purified” or “biologically pure” protein is sufficiently free of other materials such that any impurities do not materially affect the biological properties of the protein or cause other adverse consequences. That is, a nucleic acid or peptide of this invention is purified if it is substantially free of cellular material, viral material, or culture medium when produced by recombinant DNA techniques, or chemical precursors or other chemicals when chemically synthesized. Purity and homogeneity are typically determined using analytical chemistry techniques, for example, polyacrylamide gel electrophoresis or high performance liquid chromatography. The term “purified” can denote that a nucleic acid or protein gives rise to essentially one band in an electrophoretic gel. For a protein that can be subjected to modifications, for example, phosphorylation or glycosylation, different modifications may give rise to different isolated proteins, which can be separately purified.

[0097] By “isolated polynucleotide” is meant a nucleic acid molecule that is free of the genes which, in the naturally-occurring genome of the organism from which the nucleic acid molecule of the invention is derived, flank the gene. The term therefore includes, for example, a recombinant DNA that is incorporated into a vector; into an autonomously replicating plasmid or virus; or into the genomic DNA of a prokaryote or eukaryote; or that exists as a separate molecule (for example, a cDNA or a genomic or cDNA fragment produced by PCR or restriction endonuclease digestion) independent of other sequences. In addition, the term includes an RNA molecule that is transcribed from a DNA molecule, as well as a recombinant DNA that is part of a hybrid gene encoding additional polypeptide sequence.

[0098] By an “isolated polypeptide” is meant a polypeptide of the invention that has been separated from components that naturally accompany it. Typically, the polypeptide is isolated when it is at least 60%, by weight, free from the proteins and naturally-occurring organic molecules with which it is naturally associated. Preferably, the preparation is at least 75%, more preferably at least 90%, and most preferably at least 99%, by weight, a polypeptide of the invention. An isolated polypeptide of the invention may be obtained, for example, by extraction from a natural source, by expression of a recombinant nucleic acid encoding such a polypeptide; or by chemically synthesizing the protein. Purity can be measured by any appropriate method, for example, column chromatography, polyacrylamide gel electrophoresis, or by HPLC analysis.

[0099] The term “linker”, as used herein, refers to a molecule that links two moieties. In one embodiment, the term “linker” refers to a covalent linker (e.g., covalent bond) or a non-covalent linker.

[0100] By “marker” is meant any protein or polynucleotide having an alteration in expression, level, structure, or activity that is associated with a disease or disorder. In one embodiment, SMN1 or SMN2 polypeptide or polynucleotides are markers associated with SMA.

[0101] The term “mutation,” as used herein, refers to a substitution of a residue within a sequence, e.g., a nucleic acid or amino acid sequence, with another residue, or a deletion or insertion of one or more residues within a sequence. Mutations are typically described herein by identifying the original residue followed by the position of the residue within the sequence and by the identity of the newly substituted residue. Various methods for making the amino acid substitutions (mutations) provided herein are well known in the art, and are provided by, for example, Green and Sambrook, Molecular Cloning: A Laboratory Manual (4^{th} ed., Cold Spring Harbor Laboratory Press, Cold Spring Harbor, N.Y. (2012)). In one embodiment, the term “mutation” refers to a genomic alteration that results in the loss of or a decrease in SMN1 polypeptide expression.

[0102] The terms “nucleic acid” and “nucleic acid molecule,” as used herein, refer to a compound comprising a nucleobase and an acidic moiety, e.g., a nucleoside, a nucleotide, or a polymer of nucleotides. Typically, polymeric nucleic acids, e.g., nucleic acid molecules comprising three or more nucleotides are linear molecules, in which adjacent nucleotides are linked to each other via a phosphodiester linkage. In some embodiments, “nucleic acid” refers to individual nucleic acid residues (e.g., nucleotides and/or nucleosides). In some embodiments, “nucleic acid” refers to an oligonucleotide chain comprising three or more individual nucleotide residues. As used herein, the terms “oligonucleotide” and “polynucleotide” can be used interchangeably to refer to a polymer of nucleotides (e.g., a string of at least three nucleotides). In some embodiments, “nucleic acid” encompasses RNA as well as single and/or double-stranded DNA. Nucleic acids may be naturally occurring, for example, in the context of a genome, a transcript, an mRNA, tRNA, rRNA, siRNA, snRNA, a plasmid, cosmid, chromosome, chromatid, or other naturally occurring nucleic acid molecule. On the other hand, a nucleic acid molecule may be a non-naturally occurring molecule, e.g., a recombinant DNA or RNA, an artificial chromosome, an engineered genome, or fragment thereof, or a synthetic DNA, RNA, DNA/RNA hybrid, or including non-naturally occurring nucleotides or nucleosides. Furthermore, the terms “nucleic acid,” “DNA,” “RNA,” and/or similar terms include nucleic acid analogs, e.g., analogs having other than a phosphodiester backbone. Nucleic acids can be purified from natural sources, produced using recombinant expression systems and optionally purified, chemically synthesized, etc. Where appropriate, e.g., in the case of chemically synthesized molecules, nucleic acids can comprise nucleoside analogs such as analogs having chemically modified bases or sugars, and backbone modifications. A nucleic acid sequence is presented in the 5′ to 3′ direction unless otherwise indicated. In some embodiments, a nucleic acid is or comprises natural nucleosides (e.g. adenosine, thymidine, guanosine, cytidine, uridine, deoxyadenosine, deoxythymidine, deoxyguanosine, and deoxycytidine); nucleoside analogs (e.g., 2-aminoadenosine, 2-thiothymidine, inosine, pyrrolo-pyrimidine, 3-methyl adenosine, 5-methylcytidine, 2-aminoadenosine, C5-bromouridine, C5-fluorouridine, C5-iodouridine, C5-propynyl-uridine, C5-propynyl-cytidine, C5-methylcytidine, 2-aminoadenosine, 7-deazaadenosine, 7-deazaguanosine, 8-oxoadenosine, 8-oxoguanosine, 0(6)-methylguanine, and 2-thiocytidine); chemically modified bases; biologically modified bases (e.g., methylated bases); intercalated bases; modified sugars (2′-e.g., fluororibose, ribose, 2′-deoxyribose, arabinose, and hexose); and/or modified phosphate groups (e.g., phosphorothioates and 5′-N-phosphoramidite linkages).

[0103] The term “nuclear localization sequence,” “nuclear localization signal,” or “NLS” refers to an amino acid sequence that promotes import of a protein into the cell nucleus. Nuclear localization sequences are known in the art and described, for example, in Plank et al., International PCT application, PCT/EP2000/011690, filed Nov. 23, 2000, published as WO/2001/038547 on May 31, 2001, the contents of which are incorporated herein by reference for their disclosure of exemplary nuclear localization sequences. In other embodiments, the NLS is an optimized NLS described, for example, by Koblan et al., Nature Biotech. 2018 doi:10.1038/nbt.4172. In some embodiments an NLS comprises the amino acid sequence

(SEQ ID NO: 190)
KRTADGSEFESPKKKRKV,
(SEQ ID NO: 191)
KRPAATKKAGQAKKKK,
(SEQ ID NO: 192)
KKTELQTTNAENKTKKL,
(SEQ ID NO: 193)
KRGINDRNFWRGENGRKTR,
(SEQ ID NO: 194)
RKSGKIAAIVVKRPRK,
(SEQ ID NO: 195)
PKKKRKV,
or
(SEQ ID NO: 196)
MDSLLMNRRKFLYQFKNVRWAKGRRETYLC.

[0104] The term “nucleobase,” “nitrogenous base,” or “base,” used interchangeably herein, refers to a nitrogen-containing biological compound that forms a nucleoside, which in turn is a component of a nucleotide. The ability of nucleobases to form base pairs and to stack one upon another leads directly to long-chain helical structures such as ribonucleic acid (RNA) and deoxyribonucleic acid (DNA). Five nucleobases—adenine (A), cytosine (C), guanine (G), thymine (T), and uracil (U)—are called primary or canonical. Adenine and guanine are derived from purine, and cytosine, uracil, and thymine are derived from pyrimidine. DNA and RNA can also contain other (non-primary) bases that are modified. Non-limiting exemplary modified nucleobases can include hypoxanthine, xanthine, 7-methylguanine, 5,6-dihydrouracil, 5-methylcytosine (m5C), and 5-hydromethylcytosine. Hypoxanthine and xanthine can be created through mutagen presence, both of them through deamination (replacement of the amine group with a carbonyl group). Hypoxanthine can be modified from adenine. Xanthine can be modified from guanine. Uracil can result from deamination of cytosine. A “nucleoside” consists of a nucleobase and a five carbon sugar (either ribose or deoxyribose). Examples of a nucleoside include adenosine, guanosine, uridine, cytidine, 5-methyluridine (m5U), deoxyadenosine, deoxyguanosine, thymidine, deoxyuridine, and deoxycytidine. Examples of a nucleoside with a modified nucleobase includes inosine (I), xanthosine (X), 7-methylguanosine (m7G), dihydrouridine (D), 5-methylcytidine (m5C), and pseudouridine (Ψ). A “nucleotide” consists of a nucleobase, a five carbon sugar (either ribose or deoxyribose), and at least one phosphate group. Non-limiting examples of modified nucleobases and/or chemical modifications that a modified nucleobase may include are the following: pseudo-uridine, 5-Methyl-cytosine, 2′-O-methyl-3′-phosphonoacetate, 2′-O-methyl thioPACE (MSP), 2′-O-methyl-PACE (MP), 2′-fluoro RNA (2′-F-RNA), constrained ethyl (S-cEt), 2′-O-methyl (‘M’), 2′-O-methyl-3′-phosphorothioate (‘MS’), 2′-O-methyl-3′-thiophosphonoacetate (‘MSP’), 5-methoxyuridine, phosphorothioate, and N1-Methylpseudouridine.

[0105] The term “nucleic acid programmable DNA binding protein” or “napDNAbp” may be used interchangeably with “polynucleotide programmable nucleotide binding domain” to refer to a protein that associates with a nucleic acid (e.g., DNA or RNA), such as a guide nucleic acid or guide polynucleotide (e.g., gRNA), that guides the napDNAbp to a specific nucleic acid sequence. In some embodiments, the polynucleotide programmable nucleotide binding domain is a polynucleotide programmable DNA binding domain. In some embodiments, the polynucleotide programmable nucleotide binding domain is a polynucleotide programmable RNA binding domain. In some embodiments, the polynucleotide programmable nucleotide binding domain is a Cas9 protein. A Cas9 protein can associate with a guide RNA that guides the Cas9 protein to a specific DNA sequence that is complementary to the guide RNA. In some embodiments, the napDNAbp is a Cas9 domain, for example a nuclease active Cas9, a Cas9 nickase (nCas9), or a nuclease inactive Cas9 (dCas9). Non-limiting examples of nucleic acid programmable DNA binding proteins include, Cas9 (e.g., dCas9 and nCas9), Cas12a/Cpf1, Cas12b/C2c1, Cas12c/C2c3, Cas12d/CasY, Cas12e/CasX, Cas12g, Cas12h, Cas12i, and Cas12j/CasΦ (Cas12j/Casphi). Non-limiting examples of Cas enzymes include Cas1, Cas1B, Cas2, Cas3, Cas4, Cas5, Cas5d, Cas5t, Cas5h, Cas5a, Cas6, Cas7, Cas8, Cas8a, Cas8b, Cas8c, Cas9 (also known as Csn1 or Csx12), Cas10, Cas10d, Cas12a/Cpf1, Cas12b/C2c1, Cas12c/C2c3, Cas12d/CasY, Cas12e/CasX, Cas12g, Cas12h, Cas12i, Cas12j/CasΦ, Cpf1, Csy1, Csy2, Csy3, Csy4, Cse1, Cse2, Cse3, Cse4, Cse5e, Csc1, Csc2, Csa5, Csn1, Csn2, Csm1, Csm2, Csm3, Csm4, Csm5, Csm6, Cmr1, Cmr3, Cmr4, Cmr5, Cmr6, Csb1, Csb2, Csb3, Csx17, Csx14, Csx10, Csx16, CsaX, Csx3, Csx1, Csx1S, Csx11, Csf1, Csf2, CsO, Csf4, Csd1, Csd2, Cst1, Cst2, Csh1, Csh2, Csa1, Csa2, Csa3, Csa4, Csa5, Type II Cas effector proteins, Type V Cas effector proteins, Type VI Cas effector proteins, CARF, DinG, homologues thereof, or modified or engineered versions thereof. Other nucleic acid programmable DNA binding proteins are also within the scope of this disclosure, although they may not be specifically listed in this disclosure. See, e.g., Makarova et al. “Classification and Nomenclature of CRISPR-Cas Systems: Where from Here?” CRISPR J. 2018 October; 1:325-336. doi: 10.1089/crispr.2018.0033; Yan et al., “Functionally diverse type V CRISPR-Cas systems” Science. 2019 Jan. 4; 363(6422):88-91. doi: 10.1126/science.aav7271, the entire contents of each are hereby incorporated by reference.

[0106] Exemplary nucleic acid programmable DNA binding proteins and nucleic acid sequences encoding nucleic acid programmable DNA binding proteins are provided in the Sequence Listing as SEQ ID NOs: 197-230, and 378.

[0107] The terms “nucleobase editing domain” or “nucleobase editing protein,” as used herein, refers to a protein or enzyme that can catalyze a nucleobase modification in RNA or DNA, such as cytosine (or cytidine) to uracil (or uridine) or thymine (or thymidine), and adenine (or adenosine) to hypoxanthine (or inosine) deaminations, as well as non-templated nucleotide additions and insertions. In some embodiments, the nucleobase editing domain is a deaminase domain (e.g., an adenine deaminase or an adenosine deaminase; or a cytidine deaminase or a cytosine deaminase).

[0108] As used herein, “obtaining” as in “obtaining an agent” includes synthesizing, purchasing, or otherwise acquiring the agent.

[0109] By “subject” or “patient” is meant a mammal, including, but not limited to, a human or non-human mammal. In embodiments, the mammal is a bovine, equine, canine, ovine, rabbit, rodent, human, non-human primate, or feline. In an embodiment, “patient” refers to a mammalian subject with a higher than average likelihood of developing a disease or a disorder. Exemplary patients can be humans, non-human primates, cats, dogs, pigs, cattle, cats, horses, camels, llamas, goats, sheep, rodents (e.g., mice, rabbits, rats, or guinea pigs) and other mammalians that can benefit from the therapies disclosed herein. Exemplary human patients can be male and/or female.

[0110] “Patient in need thereof” or “subject in need thereof” is referred to herein as a patient diagnosed with, at risk or having, predetermined to have, or suspected of having a disease or disorder. In one embodiment, a subject in need suffers from SMA.

[0111] The terms “pathogenic mutation”, “pathogenic variant”, “disease causing mutation”, “disease causing variant”, “deleterious mutation”, or “predisposing mutation” refers to a genetic alteration or mutation that is associated with a disease or disorder or that increases an individual's susceptibility or predisposition to a certain disease or disorder. In some embodiments, the pathogenic mutation comprises at least one wild-type amino acid substituted by at least one pathogenic amino acid in a protein encoded by a gene. In some embodiments, the pathogenic mutation is in a terminating region (e.g., stop codon). In some embodiments, the pathogenic mutation is in a non-coding region (e.g., intron, promoter, etc.).

[0112] The terms “protein”, “peptide”, “polypeptide”, and their grammatical equivalents are used interchangeably herein, and refer to a polymer of amino acid residues linked together by peptide (amide) bonds. A protein, peptide, or polypeptide can be naturally occurring, recombinant, or synthetic, or any combination thereof.

[0113] The term “fusion protein” as used herein refers to a hybrid polypeptide which comprises protein domains from at least two different proteins.

[0114] The term “recombinant” as used herein in the context of proteins or nucleic acids refers to proteins or nucleic acids that do not occur in nature but are the product of human engineering. For example, in some embodiments, a recombinant protein or nucleic acid molecule comprises an amino acid or nucleotide sequence that comprises at least one, at least two, at least three, at least four, at least five, at least six, or at least seven mutations as compared to any naturally occurring sequence.

[0115] By “reduces” is meant a negative alteration of at least 10%, 25%, 50%, 75%, or 100%.

[0116] By “reference” is meant a standard or control condition. In one embodiment, the reference is a wild-type or healthy cell. In other embodiments and without limitation, a reference is an untreated cell that is not subjected to a test condition, or is subjected to placebo or normal saline, medium, buffer, and/or a control vector that does not harbor a polynucleotide of interest.

[0117] In one embodiment, a reference is a cell or subject expressing wild-type SMN1.

[0118] A “reference sequence” is a defined sequence used as a basis for sequence comparison. A reference sequence may be a subset of or the entirety of a specified sequence; for example, a segment of a full-length cDNA or gene sequence, or the complete cDNA or gene sequence. For polypeptides, the length of the reference polypeptide sequence will generally be at least about 16 amino acids, at least about 20 amino acids, at least about 25 amino acids, about 35 amino acids, about 50 amino acids, or about 100 amino acids. For nucleic acids, the length of the reference nucleic acid sequence will generally be at least about 50 nucleotides, at least about 60 nucleotides, at least about 75 nucleotides, about 100 nucleotides or about 300 nucleotides or any integer thereabout or therebetween. In some embodiments, a reference sequence is a wild-type sequence of a protein of interest. In other embodiments, a reference sequence is a polynucleotide sequence encoding a wild-type protein.

[0119] The term “RNA-programmable nuclease,” and “RNA-guided nuclease” refer to a nuclease that forms a complex with (e.g., binds or associates with) one or more RNA(s) that is not a target for cleavage. In some embodiments, an RNA-programmable nuclease, when in a complex with an RNA, may be referred to as a nuclease:RNA complex. Typically, the bound RNA(s) is referred to as a guide RNA (gRNA). In some embodiments, the RNA-programmable nuclease is the (CRISPR-associated system) Cas9 endonuclease, for example, Cas9 (Csn1) from Streptococcus pyogenes (e.g., SEQ ID NO: 197), Cas9 from Neisseria meningitidis (NmeCas9; SEQ ID NO: 208), Nme2Cas9 (SEQ ID NO: 209), Streptococcus constellatus (ScoCas9), or derivatives thereof (e.g., a sequence with at least about 85% sequence identity to a Cas9, such as Nme2Cas9 or spCas9).

[0120] The term “single nucleotide polymorphism (SNP)” is a variation in a single nucleotide that occurs at a specific position in the genome, where each variation is present to some appreciable degree within a population (e.g., >1%). SNPs can fall within coding regions of genes, non-coding regions of genes, or in the intergenic regions (regions between genes). In some embodiments, SNPs within a coding sequence do not necessarily change the amino acid sequence of the protein that is produced, due to degeneracy of the genetic code. SNPs in the coding region are of two types: synonymous and nonsynonymous SNPs. Synonymous SNPs do not affect the protein sequence, while nonsynonymous SNPs change the amino acid sequence of protein. The nonsynonymous SNPs are of two types: missense and nonsense. SNPs that are not in protein-coding regions can still affect gene splicing, transcription factor binding, messenger RNA degradation, or the sequence of noncoding RNA. Gene expression affected by this type of SNP is referred to as an eSNP (expression SNP) and can be upstream or downstream from the gene. A single nucleotide variant (SNV) is a variation in a single nucleotide without any limitations of frequency and can arise in somatic cells. A somatic single nucleotide variation can also be called a single-nucleotide alteration.

[0121] By “specifically binds” is meant a nucleic acid molecule, polypeptide, polypeptide/polynucleotide complex, compound, or molecule that recognizes and binds a polypeptide and/or nucleic acid molecule of the invention, but which does not substantially recognize and bind other molecules in a sample, for example, a biological sample.

[0122] By “substantially identical” is meant a polypeptide or nucleic acid molecule exhibiting at least 50% identity to a reference amino acid sequence. In one embodiment, a reference sequence is a wild-type amino acid or nucleic acid sequence. In another embodiment, a reference sequence is any one of the amino acid or nucleic acid sequences described herein. In one embodiment, such a sequence is at about 60%, 80%, 85%, 90%, 95%, 96%, 97%, 98%, 99%, 99.9%, or even 99.99% identical at the amino acid level or nucleic acid level to the sequence used for comparison.

[0123] Sequence identity is typically measured using sequence analysis software (for example, Sequence Analysis Software Package of the Genetics Computer Group, University of Wisconsin Biotechnology Center, 1710 University Avenue, Madison, Wis. 53705, BLAST, BESTFIT, GAP, or PILEUP/PRETTYBOX programs). Such software matches identical or similar sequences by assigning degrees of homology to various substitutions, deletions, and/or other modifications. Conservative substitutions typically include substitutions within the following groups: glycine, alanine; valine, isoleucine, leucine; aspartic acid, glutamic acid, asparagine, glutamine; serine, threonine; lysine, arginine; and phenylalanine, tyrosine. In an exemplary approach to determining the degree of identity, a BLAST program may be used, with a probability score between e⁻³ and e⁻¹⁰⁰ indicating a closely related sequence.

COBALT is used, for example, with the following parameters:
[0124] a) alignment parameters: Gap penalties-11,-1 and End-Gap penalties-5,-1,
[0125] b) CDD Parameters: Use RPS BLAST on; Blast E-value 0.003; Find Conserved columns and Recompute on, and
[0126] c) Query Clustering Parameters: Use query clusters on; Word Size 4; Max cluster distance 0.8; Alphabet Regular.
   EMBOSS Needle is used, for example, with the following parameters:
[0127] a) Matrix: BLOSUM62;
[0128] b) GAP OPEN: 10;
[0129] c) GAP EXTEND: 0.5;
[0130] d) OUTPUT FORMAT: pair;
[0131] e) END GAP PENALTY: false;
[0132] f) END GAP OPEN: 10; and
[0133] g) END GAP EXTEND: 0.5.

[0134] Nucleic acid molecules useful in the methods of the invention include any nucleic acid molecule that encodes a polypeptide of the disclosure or a functional fragment thereof. Such nucleic acid molecules need not be 100% identical with an endogenous nucleic acid sequence but will typically exhibit substantial identity. Polynucleotides having “substantial identity” to an endogenous sequence are typically capable of hybridizing with at least one strand of a double-stranded nucleic acid molecule. Nucleic acid molecules useful in the methods of the invention include any nucleic acid molecule that encodes a polypeptide of the invention or a functional fragment thereof. Such nucleic acid molecules need not be 100% identical with an endogenous nucleic acid sequence but will typically exhibit substantial identity. Polynucleotides having “substantial identity” to an endogenous sequence are typically capable of hybridizing with at least one strand of a double-stranded nucleic acid molecule. By “hybridize” is meant pair to form a double-stranded molecule between complementary polynucleotide sequences (e.g., a gene described herein), or portions thereof, under various conditions of stringency. (See, e.g., Wahl, G. M. and S. L. Berger (1987) Methods Enzymol. 152:399; Kimmel, A. R. (1987) Methods Enzymol. 152:507).

[0135] For example, stringent salt concentration will ordinarily be less than about 750 mM NaCl and 75 mM trisodium citrate, preferably less than about 500 mM NaCl and 50 mM trisodium citrate, and more preferably less than about 250 mM NaCl and 25 mM trisodium citrate. Low stringency hybridization can be obtained in the absence of organic solvent, e.g., formamide, while high stringency hybridization can be obtained in the presence of at least about 35% formamide, and more preferably at least about 50% formamide. Stringent temperature conditions will ordinarily include temperatures of at least about 30° C., more preferably of at least about 37° C., and most preferably of at least about 42° C. Varying additional parameters, such as hybridization time, the concentration of detergent, e.g., sodium dodecyl sulfate (SDS), and the inclusion or exclusion of carrier DNA, are well known to those skilled in the art. Various levels of stringency are accomplished by combining these various conditions as needed. In a preferred: embodiment, hybridization will occur at 30° C. in 750 mM NaCl, 75 mM trisodium citrate, and 1% SDS. In a more preferred embodiment, hybridization will occur at 37° C. in 500 mM NaCl, 50 mM trisodium citrate, 1% SDS, 35% formamide, and 100 μg/ml denatured salmon sperm DNA (ssDNA). In a most preferred embodiment, hybridization will occur at 42° C. in 250 mM NaCl, 25 mM trisodium citrate, 1% SDS, 50% formamide, and 200 μg/ml ssDNA. Useful variations on these conditions will be readily apparent to those skilled in the art.

[0136] For most applications, washing steps that follow hybridization will also vary in stringency. Wash stringency conditions can be defined by salt concentration and by temperature. As above, wash stringency can be increased by decreasing salt concentration or by increasing temperature. For example, stringent salt concentration for the wash steps will preferably be less than about 30 mM NaCl and 3 mM trisodium citrate, and most preferably less than about 15 mM NaCl and 1.5 mM trisodium citrate. Stringent temperature conditions for the wash steps will ordinarily include a temperature of at least about 25° C., more preferably of at least about 42° C., and even more preferably of at least about 68° C. In an embodiment, wash steps will occur at 25° C. in 30 mM NaCl, 3 mM trisodium citrate, and 0.1% SDS. In another embodiment, wash steps will occur at 42 C in 15 mM NaCl, 1.5 mM trisodium citrate, and 0.1% SDS. In a more preferred embodiment, wash steps will occur at 68° C. in 15 mM NaCl, 1.5 mM trisodium citrate, and 0.1% SDS. Additional variations on these conditions will be readily apparent to those skilled in the art. Hybridization techniques are well known to those skilled in the art and are described, for example, in Benton and Davis (Science 196:180, 1977); Grunstein and Hogness (Proc. Natl. Acad. Sci., USA 72:3961, 1975); Ausubel et al. (Current Protocols in Molecular Biology, Wiley Interscience, New York, 2001); Berger and Kimmel (Guide to Molecular Cloning Techniques, 1987, Academic Press, New York); and Sambrook et al., Molecular Cloning: A Laboratory Manual, Cold Spring Harbor Laboratory Press, New York.

[0137] By “split” is meant divided into two or more fragments.

[0138] A “split Cas9 protein” or “split Cas9” refers to a Cas9 protein that is provided as an N-terminal fragment and a C-terminal fragment encoded by two separate nucleotide sequences. The polypeptides corresponding to the N-terminal portion and the C-terminal portion of the Cas9 protein may be spliced to form a “reconstituted” Cas9 protein.

[0139] The term “target site” refers to a sequence within a nucleic acid molecule that is modified. In embodiments, the modification is deamination of a base. The deaminase can be a cytidine or an adenine deaminase. The fusion protein or base editing complex comprising a deaminase may comprise a dCas9-adenosine deaminase fusion protein, a Cas12b-adenosine deaminase fusion, or a base editor disclosed herein.

[0140] As used herein, the terms “treat,” treating,” “treatment,” and the like refer to reducing or ameliorating a disorder and/or symptoms associated therewith or obtaining a desired pharmacologic and/or physiologic effect. It will be appreciated that, although not precluded, treating a disorder or condition does not require that the disorder, condition or symptoms associated therewith be completely eliminated. In some embodiments, the effect is therapeutic, i.e., without limitation, the effect partially or completely reduces, diminishes, abrogates, abates, alleviates, decreases the intensity of, or cures a disease and/or adverse symptom attributable to the disease. In some embodiments, the effect is preventative, i.e., the effect protects or prevents an occurrence or reoccurrence of a disease or condition. To this end, the presently disclosed methods comprise administering a therapeutically effective amount of a composition as described herein.

[0141] By “uracil glycosylase inhibitor” or “UGI” is meant an agent that inhibits the uracil-excision repair system. Base editors comprising a cytidine deaminase convert cytosine to uracil, which is then converted to thymine through DNA replication or repair. In various embodiments, a uracil DNA glycosylase (UGI) prevent base excision repair which changes the U back to a C. In some instances, contacting a cell and/or polynucleotide with a UGI and a base editor prevents base excision repair which changes the U back to a C. An exemplary UGI comprises an amino acid sequence as follows:

>sp|P14739|UNGI_BPPB2 Uracil-DNA glycosylase
inhibitor
(SEQ ID NO: 231)
MTNLSDIIEKETGKQLVIQESILMLPEEVEEVIGNKPESDILVHTAYDE
STDENVMLLTSDAPEYKPWALVIQDSNGENKIKML

[0142] In some embodiments, the agent inhibiting the uracil-excision repair system is a uracil stabilizing protein (USP). See, e.g., WO 2022015969 A1, incorporated herein by reference . . . .

[0143] As used herein, the term “vector” refers to a means of introducing a nucleic acid sequence into a cell, resulting in a transformed cell. Vectors include plasmids, transposons, phages, viruses, liposomes, lipid nanoparticles, and episomes. “Expression vectors” are nucleic acid sequences comprising the nucleotide sequence to be expressed in the recipient cell. Expression vectors contain a polynucleotide sequence as well as additional nucleic acid sequences to promote and/or facilitate the expression of the introduced sequence, such as start, stop, enhancer, promoter, and secretion sequences, into the genome of a mammalian cell. Examples of vectors include nucleic acid vectors, e.g., DNA vectors, such as plasmids, RNA vectors, viruses or other suitable replicons (e.g., viral vectors). A variety of vectors have been developed for the delivery of polynucleotides encoding exogenous proteins into a prokaryotic or eukaryotic cell. Examples of such expression vectors are disclosed in, e.g., WO 1994/11026; incorporated herein by reference. Certain vectors that can be used for the expression of antibodies and antibody fragments of some aspects and embodiments herein include plasmids that contain regulatory sequences, such as promoter and enhancer regions, which direct gene transcription. Other useful vectors for expression of antibodies and antibody fragments contain polynucleotide sequences that enhance the rate of translation of these genes or improve the stability or nuclear export of the mRNA that results from gene transcription. These sequence elements include, e.g., 5′ and 3′ untranslated regions, an internal ribosomal entry site (IRES), and polyadenylation signal site in order to direct efficient transcription of the gene carried on the expression vector. The expression vectors of some aspects and embodiments herein may also contain a polynucleotide encoding a marker for selection of cells that contain such a vector. Examples of a suitable marker include genes that encode resistance to antibiotics, such as ampicillin, chloramphenicol, kanamycin, or nourseothricin.

[0144] Ranges provided herein are understood to be shorthand for all of the values within the range. For example, a range of 1 to 50 is understood to include any number, combination of numbers, or sub-range from the group consisting 1, 2, 3, 4, 5, 6, 7, 8, 9, 10, 11, 12, 13, 14, 15, 16, 17, 18, 19, 20, 21, 22, 23, 24, 25, 26, 27, 28, 29, 30, 31, 32, 33, 34, 35, 36, 37, 38, 39, 40, 41, 42, 43, 44, 45, 46, 47, 48, 49, or 50.

[0145] The recitation of a listing of chemical groups in any definition of a variable herein includes definitions of that variable as any single group or combination of listed groups. The recitation of an embodiment for a variable or aspect herein includes that embodiment as any single embodiment or in combination with any other embodiments or portions thereof.

[0146] All terms are intended to be understood as they would be understood by a person skilled in the art. Unless defined otherwise, all technical and scientific terms used herein have the same meaning as commonly understood by one of ordinary skill in the art to which the disclosure pertains In this application, the use of the singular includes the plural unless specifically stated otherwise. It must be noted that, as used in the specification, the singular forms “a,” “an” and “the” include plural referents unless the context clearly dictates otherwise. In this application, the use of “or” means “and/or” unless stated otherwise. Furthermore, use of the term “including” as well as other forms, such as “include”, “includes,” and “included,” is not limiting.

[0147] As used in this specification and claim(s), the words “comprising” (and any form of comprising, such as “comprise” and “comprises”), “having” (and any form of having, such as “have” and “has”), “including” (and any form of including, such as “includes” and “include”) or “containing” (and any form of containing, such as “contains” and “contain”) are inclusive or open-ended and do not exclude additional, unrecited elements or method steps. Any embodiments specified as “comprising” a particular component(s) or element(s) are also contemplated as “consisting of” or “consisting essentially of” the particular component(s) or element(s) in some embodiments. It is contemplated that any embodiment discussed in this specification can be implemented with respect to any method or composition of the present disclosure, and vice versa. Furthermore, compositions of the present disclosure can be used to achieve methods of the present disclosure.

[0148] Reference in the specification to “some embodiments,” “an embodiment,” “one embodiment” or “other embodiments” means that a particular feature, structure, or characteristic described in connection with the embodiments is included in at least some embodiments, but not necessarily all embodiments, of the present disclosures.

### BRIEF DESCRIPTION OF THE DRAWINGS

[0149] FIG. 1 provides a ribbon diagram of an SMN2 polypeptide and a schematic representation of alterations that may be introduced to an SMN2 polynucleotide sequence using the methods and base editors provided herein to treat SMA. In embodiments, Intron 7 of SMN2 is modified by introducing a C10>T alteration, which disrupts local secondary structure. The precise conversion of Exon 7 C6U or C6T (i.e., altering T6 of SMN2 to be a C, as in SMN1) introduces an alteration that mimics an SMN1 sequence. Introducing an Exon 7 A54G alteration in SMN2 alters splicing.

[0150] FIG. 2 provides a bar graph showing percent C-to-T conversion (%) at C10, C7, and C11 of Intron 7 of an SMN2 polynucleotide. The base editors used to effect the edits were a BE4 and a pmCDA-BE4.

[0151] FIG. 3 provides a bar graph showing percent C-to-T conversion (%) at C10 of Intron 7 of an SMN2 polynucleotide. The base editors used to effect the edits were a BE4 and a pmCDA-BE4.

[0152] FIG. 4 provides a bar graph showing percent C-to-T conversion (%) at C7 of Intron 7 of an SMN2 polynucleotide. The base editors used to effect the edits were a BE4 and a pmCDA-BE4.

[0153] FIG. 5 provides a bar graph showing percent C-to-T conversion (%) at C11 of Intron 7 of an SMN2 polynucleotide. The base editors used to effect the edits were a BE4 and a pmCDA-BE4.

[0154] FIG. 6 provides a schematic diagram illustrating how the severity of spinal muscular atrophy (SMA) can depend upon the number of copies of SMN2 present in the genome of a subject deficient for expression of functional SMN1 polypeptides from SMN1. Each copy of SMN2 in the genome provides for a small amount of expression of functional survival motor neuron (SMN) protein. The most severe form of SMA is Type 1, which generally corresponds to a subject with a genome containing about 2 copies of SMN2. Type 2 SMA corresponds to a subject with a genome containing about 2 copies of SMN2. Type 3 SMA, which is the least severe form of the disease, generally corresponds to a subject with a genome containing about 3 to 4 copies of SMN2. As shown in FIG. 6, the transcription from the SMN2 gene results in the production of about 90% transcripts spliced to omit Exon 7 and that encode a protein containing a degron, and about 10% transcripts spliced to include Exon 7 and encoding a full-length SMN protein (i.e., SMN2). In FIG. 6, the left portion of the figure depicts the SMN1 and SMN2 genes and the right portion of the figure depicts spliced mRNA transcripts expressed from the gene. In FIG. 6, the C above the SMN1 gene indicates the C6 nucleotide of Exon 7 that corresponds to T6 in Exon 7 of the SMN2 gene. Altering T6 of SMN2 to be a C can increase levels of incorporation of Exon 7 into spliced transcripts expressed from SMN2.

[0155] FIG. 7 provides a schematic diagram showing targets for base editing in the SMN2 gene The adenosine on the DNA strand complementary to T6 in Exon 7 of SMN2 is deaminated to alter the nucleotide to a G and, thereby, alter T6 to C6. SMN1 contains a cytidine at position 6 of Exon 7 and this cytidine plays a role in proper splicing of transcripts expressed from SMN1 to include Exon 7. Alteration of A54 in Exon 7 or of C10 in the intron downstream of Exon 7 can also improve levels of incorporation of Exon 7 into spliced transcripts expressed from SMN2. These alterations are associated with an increase in levels of SMN expressed in a cell.

[0156] FIGS. 8A-8C provide bar graphs and schematic diagrams showing levels of expression of the SMN2 transcripts indicated both above and beneath each plot in SMA patient fibroblast cells (GM03813 cells) edited using the indicated base editor systems (x-axis) (see Tables 2B and 2C). FIG. 8A provides a bar graph showing total levels of spliced SMN transcripts measured in the cells. The transcript levels were measured using qRT-PCR in combination with a probe targeting the region of the spliced SMIN2 transcript depicted in the schematic below the plot straddling Exon 1 and Exon 2 in combination with a forward (F) and reverse (R) primer complementary to the indicated regions of the transcript. FIG. 8B provides a bar graph showing total levels of spliced SMN2 transcripts measured in the cells that contained Exon 7. The transcript levels were measured using qRT-PCR in combination with a probe targeting the region of the spliced SMN2 transcript depicted in the schematic below the plot within Exon 7 in combination with a forward (2F) and reverse (1R) primer complementary to the indicated regions of the transcript. FIG. 8C provides a bar graph showing total levels of spliced SMN transcripts measured in the cells that were lacking Exon 7. The transcript levels were measured using qRT-PCR in combination with a probe targeting the region of the spliced SMN2 transcript depicted in the schematic below the plot straddling Exon 6 and Exon 8 in combination with a forward (1F) and reverse (1R) primer complementary to the indicated regions of the transcript. In FIGS. 8A-8C untreated cells (untreated) and mock transfected cells (Mock transf.) were used as negative controls, transfection with 100 nM nusinersen was used as a positive control, and the base editing system containing a cytidine base editor (CBE) and guide number 88, which did not target the SMN2 gene, was used as a positive control for base editing. In FIGS. 8A-8C, “ASO” indicates transfection with the antisense oligonucleotide (ASO) nusinersen. In FIGS. 8A-8C, transcript levels were normalized to levels measured for the TATA-box binding protein (TBP) housekeeping gene.

[0157] FIGS. 9A-9C provide bar graphs and a schematic showing base editing efficiencies achieved in SMA patient fibroblast cells (GM03813 cells) using the guide polynucleotide gRNA1962 (see Tables 2B and 2C for sequence) in combination with a cytidine base editor (CBE) (FIG. 9A) or an adenosine base editor (ABE) (FIG. 9B). In FIGS. 9A and 9B, untreated cells (untreated) were used as a negative control, and the base editing system containing a cytidine base editor (CBE) and guide number 88, which did not target the SMN2 gene, was used as a positive control for base editing. The base editor system CBE+gRNA1962 facilitated base editing near the 5′ splice site. FIG. 9C provides a schematic depicting the two adenosines (boxed) targeted by a base editing system comprising an adenosine base editor and gRNA9162 and the two adenosines (boxed) targeted by a base editing system comprising a cytidine base editor (CBE) and gRNA9162. Editing of the first A (lower strand, first from left in box) to a G results in a silent mutation (i.e., AAT→AAC; Asn→Asn). Editing of the second A (lower strand, second from left in box) to G removes a stop codon from Exon 7. Both C's boxed within the lower strand depicted in FIG. 9C fall outside the coding sequence (CDS) of SMN2. Not intending to be bound by theory, altering either of the boxed cytidines may affect RNA stem loop structure and a nearby 5′ splice site, improving Exon 7 inclusion (see Singh, et al. “Splicing of a Critical Exon of Human Survival Motor Neuron Is Regulated by a Unique Silencer Element Located in the Last Intron,” Molecular and Cellular Biology, 26:1333-1346 (2006), the disclosure of which is incorporated herein by reference in its entirety for all purposes). In FIG. 9C, the nucleotide sequences depicted are complementary to one another and the top strand has the following sequence:

(SEQ ID NO: 617)
AGGGTTTTAGACAAAATCAAAAAGAAGGAAGGTGCTCACATTCCTTAAA
TTAAGGAGTAAGTC.

[0158] FIGS. 10A-10C provide bar graphs and schematics showing levels of expression of the SMN2 transcripts indicated both above and below each plot in SMA patient fibroblast cells (GM03813 cells) edited using the indicated base editor systems (x-axis) (see Tables 2B and 2C). FIG. 10A provides a bar graph showing total levels of spliced SMN transcripts measured in the cells. The transcript levels were measured using qRT-PCR in combination with a probe targeting the region of the spliced SMN2 transcript depicted in the schematic below the plot straddling Exon 1 and Exon 2 in combination with a forward (F) and reverse (R) primer complementary to the indicated regions of the transcript. FIG. 10B provides a bar graph showing total levels of spliced SMN transcripts measured in the cells that contained Exon 7. The transcript levels were measured using qRT-PCR in combination with a probe targeting the region of the spliced SMN2 transcript depicted in the schematic below the plot within Exon 7 in combination with a forward (2F) and reverse (1R) primer complementary to the indicated regions of the transcript. FIG. 10C provides a bar graph showing total levels of spliced SMN transcripts measured in the cells that were lacking Exon 7. The transcript levels were measured using qRT-PCR in combination with a probe targeting the region of the spliced SMN2 transcript depicted in the schematic below the plot straddling Exon 6 and Exon 8 in combination with a forward (1F) and reverse (1R) primer complementary to the indicated regions of the transcript. In FIGS. 10A-10C untreated cells (untreated) and mock transfected cells (Mock transf.) were used as negative controls, transfection with 30 nM nusinersen was used as a positive control, and the base editing system containing a cytidine base editor (CBE) and guide number 88, which did not target the SMN2 gene, was used as a positive control for base editing. In FIGS. 10A-10C, “ASO” indicates transfection with the antisense oligonucleotide (ASO) nusinersen. In FIGS. 10A-10C, transcript levels were normalized to levels measured for the TATA-box binding protein (TBP) housekeeping gene.

[0159] FIGS. 11A and 11B provide a bar graph and a schematic diagram showing base editing efficiencies achieved in SMA patient fibroblast cells (GM03813 cells) using the guide polynucleotide gRNA1973 (see sequence provided in Tables 2B and 2C) in combination with an adenosine base editor (ABE). In FIG. 11A, untreated cells (untreated) were used as a negative control, and the base editing system containing a cytidine base editor (CBE) and guide number 88, which did not target the SMN2 gene, was used as a positive control for base editing. FIG. 11B provides a schematic showing three adenines (boxed) within Exon 7 of SMN2 that are targeted by the base editing system containing gRNA1973 and the ABE). In FIG. 11B, the nucleotide sequences depicted are complementary to one another and the top strand has the following sequence:

(SEQ ID NO: 617)
AGGGTTTTAGACAAAATCAAAAAGAAGGAAGGTGCTCACATTCCTTAAA
TTAAGGAGTAAGTC.

[0160] FIGS. 12A-12C provide bar graphs and schematic diagrams showing levels of expression of the SMN2 transcripts indicated both above and below each plot in SMA patient fibroblast cells (GM03813 cells) edited using the indicated base editor systems (x-axis) (see Tables 2B and 2C). FIG. 12A provides a bar graph showing total levels of spliced SMN transcripts measured in the cells. The transcript levels were measured using qRT-PCR in combination with a probe targeting the region of the spliced SMN2 transcript depicted in the schematic below the plot straddling Exon 1 and Exon 2 in combination with a forward (F) and reverse (R) primer complementary to the indicated regions of the transcript. FIG. 12B provides a bar graph showing total levels of spliced SMN2 transcripts measured in the cells that contained Exon 7. The transcript levels were measured using qRT-PCR in combination with a probe targeting the region of the spliced SMN2 transcript depicted in the schematic below the plot within Exon 7 in combination with a forward (2F) and reverse (1R) primer complementary to the indicated regions of the transcript. FIG. 12C provides a bar graph showing total levels of spliced SMN2 transcripts measured in the cells that were lacking Exon 7. The transcript levels were measured using qRT-PCR in combination with a probe targeting the region of the spliced SMN2 transcript depicted in the schematic below the plot straddling Exon 6 and Exon 8 in combination with a forward (1F) and reverse (1R) primer complementary to the indicated regions of the transcript. In FIGS. 12A-12C untreated cells (untreated) and mock transfected cells (Mock transf.) were used as negative controls, transfection with 30 nM nusinersen was used as a positive control, and the base editing system containing a cytidine base editor (CBE) and guide number 88, which did not target the SMN2 gene, was used as a positive control for base editing. In FIGS. 12A-12C, “ASO” indicates transfection with the antisense oligonucleotide (ASO) nusinersen. In FIGS. 12A-12C, transcript levels were normalized to levels measured for the TATA-box binding protein (TBP) housekeeping gene.

[0161] FIGS. 13A-13C provide bar graphs and schematics showing levels of expression of the transcripts indicated both above and beneath each plot in SMA patient fibroblast cells (GM03813 cells) edited using the indicated base editor systems (x-axis) (see Tables 2B and 2C). FIG. 13A provides a bar graph showing total levels of spliced SMN transcripts measured in the cells. The transcript levels were measured using qRT-PCR in combination with a probe targeting the region of the spliced SMN2 transcript depicted in the schematic below the plot straddling Exon 1 and Exon 2 in combination with a forward (F) and reverse (R) primer complementary to the indicated regions of the transcript. FIG. 13B provides a bar graph showing total levels of spliced SMN transcripts measured in the cells that contained Exon 7. The transcript levels were measured using qRT-PCR in combination with a probe targeting the region of the spliced SMN2 transcript depicted in the schematic below the plot within Exon 7 in combination with a forward (2F) and reverse (1R) primer complementary to the indicated regions of the transcript. FIG. 13C provides a bar graph showing total levels of spliced SMN transcripts measured in the cells that were lacking Exon 7. The transcript levels were measured using qRT-PCR in combination with a probe targeting the region of the spliced SMN2 transcript depicted in the schematic below the plot straddling Exon 6 and Exon 8 in combination with a forward (1F) and reverse (1R) primer complementary to the indicated regions of the transcript. In FIGS. 13A-13C untreated cells (untreated) and mock transfected cells (Mock transf.) were used as negative controls, transfection with 30 nM nusinersen was used as a positive control, and the base editing system containing a cytidine base editor (CBE) and guide number 88, which did not target the SMN2 gene, was used as a positive control for base editing. In FIGS. 13A-13C, “ASO” indicates transfection with the antisense oligonucleotide (ASO) nusinersen. In FIGS. 13A-13C, transcript levels were normalized to levels measured for the TATA-box binding protein (TBP) housekeeping gene.

[0162] FIGS. 14A and 14B provide bar graphs from an experiment undertaken to evaluate the effect of transfection with the antisense oligonucleotide (ASO) nusinersen at levels ranging from 0 to 100 nM on splicing of SMN2 transcripts in SMA patient fibroblast cells (GM03813 cells). The cells were transfected using Lipofectamine MessengerMAX and nusinersen at a concentration of 0 nM, 1 nM, 10 nM, or 100 nM. Cells were lysed after 5 days of being transfected with nusinersen and transcripts were analyzed using qRT-PCR. FIG. 14A provides a bar graph showing levels of spliced SMN2 transcripts containing Exon 7 measured in the cells. Transcript levels were normalized to transcript levels measured for the TATA-box binding protein (TBP) housekeeping gene. FIG. 14B provides a bar graph showing levels of spliced SMN2 transcripts lacking Exon 7 measured in the cells. Transcript levels were normalized to transcript levels measured for the housekeeping gene RPLP0.

[0163] FIG. 15 provides a bar graph from an experiment undertaken to compare the effect of base editing and transfection with the antisense oligonucleotide (ASO) nusinersen at levels ranging from 0 to 100 nM on SMN2 polypeptide levels measured in SMA patient fibroblast cells (GM03813 cells). The base edited cells (i.e., CBE/g1962) were transfected with the guide polynucleotide g1962 (see sequence provided in Tables 2B and 2C) and mRNA encoding the CBE using lipofectamine MessengerMAX. At five (5) days post-transfection, levels of SMN2 polypeptide were measured using an enzyme-linked immunosorbent assay (ELISA). Polypeptide levels were normalized to total protein. Total protein was measured using a Bicinchoninic acid (BCA) assay. In FIG. 15, guide 1962 was used in combination with a cytidine deaminase base editor containing a ppAPOBEC1 deaminase domain and an SpCas9 nucleic acid programmable DNA binding protein domain that recognized an NGA PAM sequence.

[0164] FIG. 16 provides a schematic diagram depicting Exon 7 of SMN2 (“SMN2 mRNA”) and portions of the two surrounding introns and providing annotations for various regions targeted by available antisense oligonucleotide (ASO) therapeutics, sites or regions targeted for base editing to influence splicing, and sites targeted by guides described herein. The amino acid sequence depicted in FIG. 16 is GFRQNQKEGRCSHSLN (SEQ ID NO: 618). The two nucleic acid sequences depicted in FIG. 16 are complementary to one another and the top strand has the following sequence:

(SEQ ID NO: 619)
AATAAAATAAGTAAAATGTCTTGTGAAACAAAATGCTTTTTAACATCCA
TATAAAGCTATCTATATATAGCTATCTATATCTATATAGCTATTTTTTT
TAACTTCCTTTATTTTCCTTACAGGGTTTTAGACAAAATCAAAAAGAAG
GAAGGTGCTCACATTCCTTAAATTAAGGAGTAAGTCTGCCAGCATTATG
AAAGTGAATCTTACTTTTGTAAAACTTTATGGTTTGTGGAAAACAAATG
TTTTTGAACATTTAAAAAGTTCAGATGTTAGAAAGTTGAAAGGTTAATG
TAA .

[0165] FIG. 17 provides a bar graph showing base editing efficiencies (A→G or C→T) measured for editing of HepG2 cells using the indicated guide polynucleotides (see sequences provided in Tables 2B and 2C) in combination with an adenosine base editor (ABE8.20) or a cytidine base editor (ppAPOBEC1). Base editing efficiencies were measured using biological triplicates. The error intervals depicted at the top of each bar show one standard deviation (STD) from the mean. The cells were transfected with the indicated guide polynucleotide and mRNA encoding the base editor using lipofectamine MessengerMAX.

[0166] FIG. 18 provides a bar graph showing base editing efficiencies measured for editing of HepG2 cells using base editing systems containing the indicated inlaid base editors (IBEs) or non-inlaid base editors (i.e., ABE8.20 or ppAPOBEC1) and the indicated guide polynucleotides. Base editing systems containing ABE8.20 or ppAPOBEC1 and guide number 088, which did not target the SMN2 gene, were used as positive controls for base editing. Base editing efficiencies were measured using biological triplicates. The error intervals depicted at the top of each bar show one standard deviation (STD) from the mean. The cells were transfected with the indicated guide polynucleotide and mRNA encoding the base editor using lipofectamine MessengerMAX.

[0167] FIG. 19 provides a series of bar graphs showing levels of expression of the transcripts indicated above each plot in SMA patient fibroblast cells (GM03813 cells) edited using the indicated base editor systems (x-axis) (see Tables 2B and 2C). In FIG. 19 “Total SMN” indicates total spliced SMN transcripts measured, “SMN+E7” indicates the total number of spliced SMN transcripts containing Exon 7 that were measured, and “SMNΔEx7 indicates the total number of spliced SMN transcripts lacking Exon 7 that were measured. Transcript measurements were carried out using qRT-PCR as described in FIGS. 8A-8C, 10A-10C, and 12A-13C. In FIG. 19, untreated cells (untreated) and mock transfected cells (Mock transfection) were used as negative controls, transfection with 100 nM nusinersen was used as a positive control, and the base editing system containing a cytidine base editor (CBE) and guide number 88, which did not target the SMN2 gene, was used as a positive control for base editing. In FIG. 19, “ASO” indicates transfection with the antisense oligonucleotide (ASO) nusinersen. In FIG. 19, transcript levels were normalized to levels measured for the TATA-box binding protein (TBP) housekeeping gene. In FIG. 19, the upper bar graphs correspond to cells transfected with 300 ng of the guide polynucleotide and 100 ng of mRNA encoding the base editor, and the lower bar graphs correspond to cells transfected with 60 ng of the guide polynucleotide and 30 ng of mRNA encoding the base editor. In FIG. 19, the guide gRNA1992 was used in combination with a cytidine deaminase base editor containing a ppAPOBEC1 deaminase domain and an SaCas9 nucleic acid programmable DNA binding protein that had specificity for an NNNRRT PAM sequence.

[0168] FIGS. 20A and 20B provide bar graphs showing base editing efficiencies measured for editing of SMA patient fibroblast cells (GM03813 cells) using base editing systems containing a cytidine base editor (CBE) or adenosine base editor (ABE) and a guide polynucleotide (see sequences provided in Tables 2B and 2C) indicated on the x-axis of the bar graphs. The left y-axis of each plot shows base editing rates for ABEs and the right y-axis of each plot shows base editing for CBEs. FIG. 20A shows base editing efficiencies measured for cells transfected using 300 ng of mRNA encoding the base editor and 100 ng of the guide polynucleotide. FIG. 20B shows base editing efficiencies measured for cells transfected using 60 ng of mRNA encoding the base editor and 30 ng or the guide polynucleotide. In FIGS. 20A and 20B, untreated cells (untreated) and mock transfected cells (Mock transfection) were used as negative controls, transfection with 100 nM nusinersen was used as a positive control, and the base editing system containing a cytidine base editor (CBE) and guide number 88, which did not target the SMN2 gene, was used as a positive control for base editing.

[0169] FIG. 21 provides a bar graph showing maximum base editing efficiencies (A→G or C→T) measured for HepG2 cells contacted with base editor systems containing ABE8.20 or ppAPOBEC1 and a guide polynucleotide (see sequences provided in Tables 2B and 2C) indicated on the x-axis.

[0170] FIG. 22 provides a bar graph showing levels of SMN2 polypeptide in SMA patient fibroblast cells (GM0318 cells) edited using base editing systems containing a cytidine base editor (CBE) or adenosine base editor (ABE) and a guide polynucleotide (see sequences provided in Tables 2B and 2C), as indicated on the x-axis. In FIG. 22, untreated cells (Untreated) were used as a negative control, and SMN2 polypeptide levels were normalized to total protein levels.

[0171] FIG. 23 provides a bar graph showing maximum A to G or C to T percent (%) base editing measured in SMA patient fibroblast cells (GM0318 cells) edited using base editing systems containing a cytidine base editor (CBE) or adenosine base editor (ABE) and a guide polynucleotide (see sequences provided in Tables 2B and 2C), as indicated on the x-axis. In FIG. 23, untreated cells (Untreated) were used as a negative control.

[0172] FIG. 24 provides a bar graph showing maximum A to G or C to T percent (%) base editing measured in SMA patient fibroblast cells (GM0318 cells) edited using base editing systems containing a cytidine base editor (CBE), adenosine base editor (ABE), or inlaid base editor (IBE) and a guide polynucleotide (see sequences provided in Tables 2B and 2C), as indicated on the x-axis. In FIG. 24, untreated cells (Untreated) and mock transfected cells (Mock transf.) were used as negative controls, transfection with 30 nM nusinersen (ASO) was used as a positive control, and the base editing system containing a cytidine base editor (CBE) or an adenosine base editor (ABE) and guide number 88, which did not target the SMN2 gene, was used as a positive control for base editing.

[0173] FIG. 25 provides a bar graph showing maximum A to G percent (%) base editing measured in SMA patient fibroblast cells (GM0318 cells) edited using base editing systems containing a cytidine base editor (CBE), adenosine base editor (ABE), or inlaid base editor (IBE) and a guide polynucleotide (see sequences provided in Tables 2B and 2C), as indicated on the x-axis. In FIG. 25, a base editing system containing a cytidine base editor (CBE) or an adenosine base editor (ABE) and guide number 88, which did not target the SMN2 gene, was used as a positive control for base editing.

[0174] FIG. 26 provides a bar graph showing levels of SMN1 transcripts measured in SMA patient fibroblast cells (GM0318 cells) edited using base editing systems containing a cytidine base editor (CBE), adenosine base editor (ABE), or inlaid base editor (IBE) and a guide polynucleotide (see sequences provided in Tables 2B and 2C), as indicated on the x-axis. In FIG. 26, untreated cells (Untreated) and mock transfected cells (Mock transf) were used as negative controls, transfection with 30 nM nusinersen (ASO) was used as a positive control, and the base editing system containing a cytidine base editor (CBE) or an adenosine base editor (ABE) and guide number 88, which did not target the SMN2 gene, was used as a positive control for base editing. In FIG. 26, transcript levels were normalized to levels measured for the TATA-box binding protein (TBP) housekeeping gene.

[0175] FIG. 27 provides a bar graph showing maximum A to G or C to T percent (%) base editing measured in SMA patient fibroblast cells (GM00232 cells) edited using base editing systems containing a cytidine base editor (CBE) or adenosine base editor (ABE), and a guide polynucleotide (see sequences provided in Tables 2B and 2C), as indicated on the x-axis. In FIG. 27, untreated cells (Untreated) and mock transfected cells (Mock transf.) were used as negative controls, and transfection with 30 nM nusinersen (ASO) was used as a positive control.

[0176] FIG. 28 provides a bar graph showing levels of SMN2 polypeptide in the SMA patient fibroblast cells (GM00232 cells) described in FIG. 27. In FIG. 28, SMN2 polypeptide levels were normalized to total protein levels.

[0177] FIG. 29 provides a bar graph showing maximum A to G or C to T percent (%) base editing measured in SMA patient fibroblast cells (GM03813 cells) edited using base editing systems containing a cytidine base editor (CBE) or adenosine base editor (ABE), and a guide polynucleotide (see sequences provided in Tables 2B and 2C), as indicated on the x-axis. In FIG. 29, untreated cells (Untreated) and mock transfected cells (Mock transf.) were used as negative controls, and transfection with 30 nM nusinersen (ASO) was used as a positive control.

[0178] FIG. 30 provides a bar graph showing levels of SMN2 polypeptide in the SMA patient fibroblast cells (GM03813 cells) described in FIG. 29. In FIG. 30, SMN2 polypeptide levels were normalized to total protein levels.

[0179] FIG. 31 provides a bar graph showing maximum A to G or C to T percent (%) base editing measured in SMA patient fibroblast cells (GM00232 cells) edited using base editing systems containing a cytidine base editor (CBE) or adenosine base editor (ABE), and a guide polynucleotide (see sequences provided in Tables 2B and 2C), as indicated on the x-axis. In FIG. 31, untreated cells (Untreated) and mock transfected cells (Mock transf.) were used as negative controls, and transfection with 30 nM nusinersen (ASO) was used as a positive control.

[0180] FIG. 32 provides a bar graph showing maximum A to G or C to T percent (%) base editing measured in SMA patient fibroblast cells (GM09677cells) edited using base editing systems containing a cytidine base editor (CBE) or adenosine base editor (ABE), and a guide polynucleotide (see sequences provided in Tables 2B and 2C), as indicated on the x-axis. In FIG. 31, untreated cells (Untreated), mock transfected cells (Mock transf.), or cells transfected with mRNA encoding a base editor variant with low-to-no base editing activity (e.g., deadABE or deadCBE) were used as negative controls, and transfection with 30 nM nusinersen (ASO) was used as a positive control.

[0181] FIGS. 33A-33C provide bar graphs showing levels of expression of the SMN2 transcripts indicated above each plot in the base edited SMA patient fibroblast cells (GM009677 cells) of FIG. 32. FIG. 33A provides a bar graph showing total levels of spliced SMN transcripts measured in the cells that were lacking Exon 7. FIG. 33B provides a bar graph showing total levels of spliced SMN transcripts measured in the cells. FIG. 33C provides a bar graph showing total levels of spliced SMN2 transcripts measured in the cells that contained Exon 7. In FIGS. 33A-33C, transcript levels were normalized to levels measured for the TATA-box binding protein (TBP) housekeeping gene.

[0182] FIGS. 34A-34C provide bar graphs showing levels of expression of the SMN2 transcripts indicated above each plot in the base edited SMA patient fibroblast cells (GM00232 cells) of FIG. 31. FIG. 34A provides a bar graph showing total levels of spliced SMN transcripts measured in the cells that were lacking Exon 7. FIG. 34B provides a bar graph showing total levels of spliced SMN transcripts measured in the cells. FIG. 34C provides a bar graph showing total levels of spliced SMN2 transcripts measured in the cells that contained Exon 7. In FIGS. 34A-34C, transcript levels were normalized to levels measured for the TATA-box binding protein (TBP) housekeeping gene.

[0183] Throughout the figures, the letter “g” is used as an abbreviation for “gRNA” (e.g., “g1976,” rather than “gRNA1976”), or a gRNA sequence is referenced by a number (e.g., “1966,” rather than “gRNA1966”)

### DETAILED DESCRIPTION OF THE INVENTION

[0184] Provided herein are compositions (e.g., base editors, endonucleases, and guide RNAs (gRNAs)) and methods for editing, modifying, or altering target polynucleotide, survival of motor neuron 2 (SMN2) polynucleotide, and the use of such compositions and methods for treating Spinal Muscular Atrophy (SMA).

[0185] The invention is based, at least in part, upon the discovery that targeted base editing of an SMN2 polynucleotide increases the expression of an SMN2 polypeptide in a cell, and that such editing can be used for the treatment of spinal muscular atrophy (SMA). In particular, increasing activity and/or expression of the SMN2 polypeptide in a subject diagnosed with SMA can be an effective treatment strategy. This increase in activity and/or expression can be effected using any of the base editing systems provided herein. Accordingly, the invention features compositions and methods for editing an SMN2 polynucleotide. The edit to the SMN2 polynucleotide is associated with an increase in expression of a functional SMN2 polypeptide in a cell of a subject, as well as with a reduction in symptoms associated with SMA.

[0186] In embodiments, the methods of the present disclosure include altering splicing of an SMN2 polynucleotide transcript. For example, the base editors or base editor systems provided herein can be used for editing a nucleobase associated with splicing efficiency. For example, the base editors or base editor systems provided herein can be used to modify Intron 7 of an SMN2 polynucleotide to disrupt a local secondary structure, to introduce a C10>T alteration, to modify Exon 7 of an SMN2 polynucleotide to introduce a U6C or T6C alteration, to modify Exon 7 of an SMN2 polynucleotide to have an A54G alteration, and/or to introduce a C10T, C7T, and/or C11T alteration in Intron 7 of an SMN2 polynucleotide (see FIG. 1). In embodiments, the methods of the invention include introducing an alteration to an SMN2 polynucleotide sequence. In some instances, the base editor is a BE4 or pmCDA-BE4 base editor.

[0187] In some embodiments, the target sequence is a regulatory element associated with an exon (e.g., Exon 7) or intron of the SMN2 polynucleotide and is associated with a change (e.g., an increase) in expression levels (e.g., an increase in SMN2 transcript and/or polypeptide levels) relative to expression levels associated with an unaltered sequence (e.g., a wild-type SMN2 polynucleotide sequence). In some embodiments, the deamination of an A or C nucleobase in the regulatory element results in improved transcription, splicing, and/or translation of the SMN2 mRNA transcript. In some embodiments, the subject has or has the potential to develop spinal muscular atrophy (SMA).

[0188] In some instances, the methods of the present disclosure include modifying an SMN2 polynucleotide to introduce a synonymous mutation, missense mutation, or other alteration associated with an increase in levels or activity of the SMN2 polynucleotide and/or polypeptide. The alterations can be effected by a base editor system, such as those described herein.

[0189] In some embodiments, the present disclosure provides base editors or nucleases that efficiently generate an intended mutation, such as a point mutation or indel, in a nucleic acid molecule (e.g., a nucleic acid within a genome of a subject) without generating a significant number of unintended mutations, such as unintended point mutations. In some embodiments, an intended mutation is a mutation that is generated by a specific base editor (e.g., an adenosine base editor or a cytidine base editor) bound to a guide polynucleotide (e.g., gRNA), specifically designed to generate the intended mutation. In some embodiments, the intended mutation is an adenine (A) to guanine (G) point mutation within the non-coding or coding region of a gene. In some embodiments, the intended mutation is a cytosine (C) to thymine (T) point mutation within the non-coding or coding region of a gene. In some embodiments, the intended mutation is a mutation of regulatory element associated with an exon (e.g., Exon 7 of an SMN2 polynucleotide) and/or intron (e.g., Intron 7 of an SMN2 polynucleotide) of a gene associated with a disease or disorder (e.g., spinal muscular atrophy). In some embodiments, the intended mutation is a missense mutation. In some embodiments, the intended mutation is a mutation improves transcription, splicing, and/or translation of a complete transcript of a gene, for example, an A to G or C to T change in a regulatory element of an SMN2 polynucleotide (e.g., a regulatory element associated with Exon 7). In some embodiments, the intended mutation is a mutation in a regulatory element of the SMN2 polynucleotide that improves transcription, splicing, and/or translation of a gene transcript and is associated with an increase in SMN2 polypeptide levels in a cell, optionally where the cell is in a subject.

[0190] In some embodiments, any of the base editors or endonucleases provided herein are capable of generating a ratio of intended mutations to unintended mutations (e.g., intended point mutations:unintended point mutations) that is greater than 1:1. In some embodiments, any of the base editors provided herein are capable of generating a ratio of intended mutations to unintended mutations (e.g., intended point mutations:unintended point mutations) that is at least 1.5:1, at least 2:1, at least 2.5:1, at least 3:1, at least 3.5:1, at least 4:1, at least 4.5:1, at least 5:1, at least 5.5:1, at least 6:1, at least 6.5:1, at least 7:1, at least 7.5:1, at least 8:1, at least 10:1, at least 12:1, at least 15:1, at least 20:1, at least 25:1, at least 30:1, at least 40:1, at least 50:1, at least 100:1, at least 150:1, at least 200:1, at least 250:1, at least 500:1, or at least 1000:1, or more.

[0191] In some embodiments, editing of a plurality of nucleobase pairs in one or more genes using the methods provided herein results in formation of at least one intended mutation. In some embodiments, the formation of the at least one intended mutation is in a regulatory element (e.g., a regulatory element associated with an intron or exon of an SMN2 polynucleotide) of a disease-associated gene and is associated with increased in SMN2 polypeptide levels in a cell, optionally where the cell is in a subject. It should be appreciated that multiplex editing can be accomplished using any method or combination of methods provided herein.

[0192] The present disclosure provides methods for the treatment of a subject diagnosed with spinal muscular atrophy. For example, in some embodiments, a method is provided that comprises administering to a subject having or having a propensity to develop spinal muscular atrophy an effective amount of a nucleobase editor (e.g., an adenosine deaminase base editor or a cytidine deaminase base editor) to effect an alteration in an SMN2 polynucleotide sequence.

### Spinal Muscular Atrophy

[0193] Proximal spinal muscular atrophy (SMA) is a disease characterized by the loss of alpha-motor neurons resulting in progressive muscle atrophy, which often leads to paralysis and death. SMA occurs in approximately 1 in 10,000 live births. Typically, a healthy individual produces most functional SMN protein (e.g., an SMN1 polypeptide) from the SMN1 gene, with a small amount produced from the SMN2 gene. The number of copies of the SMN2 gene in an individual can vary from 1 to up to 8 or more copies (see, e.g., FIG. 6). SMA occurs when there is a homozygous deletion and/or mutation of the Survival Motor Neuron 1 (SMN1) gene located on chromosome 5q13.

[0194] SMN2, a nearly identical gene also located on chromosomal segment 5q13, can produce the same protein (SMN) generated by SMN1. This is due to the small number of nucleotide differences between SMN1 and SMN2, most of which have no effect on SMN1 and/or SMN2 polypeptide levels or protein function due to their location in introns. However, SMN2's translationally silent T at nucleotide+6 of Exon 7 instead of SMN1's C causes the final RNA product to be improperly regulated. In SMN2, the majority of the pre-mRNA transcripts generated results in transcripts lacking Exon 7 (FIG. 6). SMN2 does, however, produce a small amount of full-length transcript and thus full-length protein. Improper regulation of the SMN2 gene on account of various alterations relative to the SMN1 gene results in reduced levels of polypeptides expressed from the SMN2 gene. Not intending to be bound by theory, the silent T at nucleotide+6 of Exon 7 disrupts binding of the exonic splicing enhancer SF2/ASF and creates an exonic splicing silencer hnRNP A1 binding site. Also, alterations in the SMN2 gene relative to the SMN1 gene are associated with reductions in splicing efficiency (e.g., an A54G alteration to Exon 7).

[0195] Severe disease symptoms occur with lower levels of survival of motor neuron polypeptide (e.g., SMN1 or SMN2 polypeptide), and complete absence of the Smn gene (e.g., an SMN1 and/or SMN2 polynucleotide) is embryonic lethal in mice. Thus, the methods of the present invention provide methods for introducing alterations to an SMN2 polynucleotide sequence to increase production of functional full-length SMN2 transcripts in a subject.

[0196] There are different types (0-IV) of muscular atrophy. Spinal muscular atrophy type 0 is evident before birth and is the rarest and most severe form of the condition. Affected infants move less in the womb, and as a result they are often born with joint deformities (contractures). They have extremely weak muscle tone (hypotonia) at birth. Their respiratory muscles are very weak and they often do not survive past infancy due to respiratory failure. Some infants with spinal muscular atrophy type 0 also have heart defects that are present from birth (congenital).

[0197] Spinal muscular atrophy type I (also called Werdnig-Hoffmann disease) is the most common form of the condition. It is a severe form of the disorder with muscle weakness evident at birth or within the first few months of life. Most affected children cannot control their head movements or sit unassisted. Children with this type may have swallowing problems that can lead to difficulty feeding and poor growth. They can also have breathing problems due to weakness of respiratory muscles and an abnormally bell-shaped chest that prevents the lungs from fully expanding. Most children with spinal muscular atrophy type I often do not survive past early childhood due to respiratory failure.

[0198] Spinal muscular atrophy type II (also called Dubowitz disease) is characterized by muscle weakness that develops in children between ages 6 and 8 months. Children with this type can sit without support, although they may need help getting to a seated position. However, as the muscle weakness worsens later in childhood, affected individuals may need support to sit. Individuals with spinal muscular atrophy type II cannot stand or walk unaided since the disease affects their lower limbs. They often have involuntary trembling (tremors) in their fingers, a spine that curves side-to-side (scoliosis), and respiratory muscle weakness that can be life-threatening. The life span of individuals with spinal muscular atrophy type II varies, but many people with this condition often live into their twenties or thirties.

[0199] Spinal muscular atrophy type III (also called Kugelberg-Welander disease) typically causes muscle weakness after early childhood. Individuals with this condition can stand and walk unaided, but over time, walking and climbing stairs may become increasingly difficult. Many affected individuals require wheelchair assistance later in life. People with spinal muscular atrophy type III typically remain mobile and have a normal life expectancy.

[0200] Spinal muscular atrophy type IV is rare and often begins in early adulthood. Affected individuals usually experience mild to moderate muscle weakness, tremors, and mild breathing problems. People with spinal muscular atrophy type IV typically have a normal life expectancy.

[0201] Non-limiting examples of symptoms of spinal muscular atrophy include areflexia, particularly in extremities; overall muscle weakness; poor muscle tone; limpness or a tendency to flop; difficulty achieving developmental milestones; difficulty sitting/standing/walking; adopting of a frog-leg position when sitting (hips abducted and knees flexed), particularly in children; loss of strength of the respiratory muscles: weak cough, weak cry (infants); accumulation of secretions in the lungs or throat; respiratory distress; bell-shaped torso; fasciculations (twitching) of the tongue; difficulty sucking or swallowing; and/or poor feeding.

[0202] Non-limiting examples of agents suitable for use in treatments for spinal muscular atrophy (SMA) include the following: splicing modulators, onasemnogene abeparvovec-xioi, nusinersen, risdiplam, branaplam, RG3039, PTK-SMA1, RG7800, sodium orthovanadate, aclarubicin, SMN2 gene activators, albuterol, butyrates (sodium bytyrate and sodium phenylbuterate), valproic acid, hydroxycarbamide, growth hormone, histone deacetylase inhibitors, benzamide M344, hydroxamic acids (e.g., CBHA, SBHA, entinostat, Panobinostat, trichostatin A, vorinostat, prolactin, reservatrol, curcumin, celecoxib, p38 pathway activators, SMN polynucleotide stabilizers, aminoglycosides, ibuprofen, neuroprotectors, olesoxime, thyrotropin-releasing hormone (TRH), riluzole, beta-lactam antibiotics (e.g., ceftriaxone), follistatin, muscle restoration drugs, reldesemtiv, and apitegromab. Such agents may be used in combination with the methods described herein for the treatment of SMA.

Editing of Target Genes To produce the gene edits described above, cells are contacted with one or more guide RNAs (e.g., a guide RNA containing a sequence listed in any one of Tables 2A to 2C) and a nucleobase editor polypeptide comprising a nucleic acid programmable DNA binding protein (napDNAbp) (e.g., spCas9 or saCas9) and a cytidine deaminase (e.g., ppABOBEC1) or adenosine deaminase (e.g., TadA*8.20), or comprising one or more deaminases with cytidine deaminase and/or adenosine deaminase activity (e.g., a “dual deaminase” which has cytidine and adenosine deaminase activity). In some embodiments, cells to be edited are contacted with at least one nucleic acid molecule, wherein the at least one nucleic acid molecule encodes one or more guide RNAs and a nucleobase editor polypeptide comprising a nucleic acid programmable DNA binding protein (napDNAbp) and a cytidine deaminase. In some instances, the one or more gRNAs are added directly to a cell.

[0203] Exemplary gRNAs that can be used to produce the polynucleotide edits described (e.g., alterations to a regulatory element near or associated with Exon 7 of SMN2 and/or SMN1, etc.) herein include those comprising the spacer sequences listed in Tables 2A or 2C below, extensions thereof, or fragments (e.g., functional fragments) thereof. To produce the polynucleotide edits, cells (e.g., cells in or from a subject, such as a neuron) of a subject are contacted with one or more guide RNAs containing one or more of the spacer sequences listed in Tables 2A or 2C below, extensions thereof, or fragments thereof (e.g., functional fragments thereof) and a nucleobase editor polypeptide or complex containing a nucleic acid programmable DNA binding protein (napDNAbp, such as a Cas9) and a cytidine deaminase or adenosine deaminase. In embodiments, the Cas9 is an spyCas9 or an saCas9. In embodiments, the base editor is introduced to the cell using a polynucleotide sequence (e.g., mRNA) encoding the base editor. The gRNAs containing the spacer sequences listed in Table 2A or 2C, fragments thereof (e.g., functional fragments), or extensions thereof can be used to effect the edits described above and/or described in Table 2A. In some embodiments, the gRNA comprises nucleotide analogs. These nucleotide analogs can inhibit degradation of the gRNA by cellular processes. Tables 2A and 2C provide spacer sequences to be used for gRNAs.

[0204] In some embodiments, a guide polynucleotide contains one of the following spacer sequences:

SpCas9:
(SEQ ID NO: 317)
GUUUUAGAGCUAGAAAUAGCAAGUUAAAAUAAGGCUAGUCCGUUAUCAA
CUUGAAAAAGUGGCACCGAGUCGGUGCUUUU
or
SaCas9:
(SEQ ID NO: 425)
GUUUUAGUACUCUGUAAUGAAAAUUACAGAAUCUACUAAAACAAGGCAA
AAUGCCGUGUUUAUCUCGUCAACUUGUUGGCGAGAUUUU

[0205] In various instances, it is advantageous for a spacer sequence to include a 5′ and/or a 3′ “G” nucleotide. In some cases, for example, any spacer sequence or guide polynucleotide provided herein comprises or further comprises a 5′ “G”, where, in some embodiments, the 5′ “G” is or is not complementary to a target sequence. In some embodiments, the 5′ “G” is added to a spacer sequence that does not already contain a 5′ “G.” For example, it can be advantageous for a guide RNA to include a 5′ terminal “G” when the guide RNA is expressed under the control of a U6 promoter or the like because the U6 promoter prefers a “G” at the transcription start site (see Cong, L. et al. “Multiplex genome engineering using CRISPR/Cas systems. Science 339:819-823 (2013) doi: 10.1126/science.1231143). In some cases, a 5′ terminal “G” is added to a guide polynucleotide that is to be expressed under the control of a promoter but is optionally not added to the guide polynucleotide if or when the guide polynucleotide is not expressed under the control of a promoter.

TABLE 2A
Exemplary spacer sequences.

| | | SEQ ID | | | |
|---|---|---|---|---|---|
| Name | Spacer Sequence | NO | PAM | Editor(s) | Comments |
| NGG guide 1 | UAUAUAUAGAUAGCUUUAUA | 446 | NGG | ABE | Intron 6, transitions to rat/cyno SMN1 |
| NGG guide 2 | AAACCCUGUAAGGAAAAUAA | 447 | NGG | ABE | intron/exon junction |
| NGG guide 4 | ACUUCCUUUAUUUUCCUUAC | 448 | NGG | ABE/CBE | Intron 6, several transitions to rat SMN1 |
| NGG guide 5 | CUUCCUUUAUUUUCCUUACA | 449 | NGG | ABE/CBE | Intron 6, several transitions to rat SMN1 |
| NGG guide 6 | CAGACUUACUCCUUAAUUUA | 450 | NGG | ABE/CBE | intron/exon junction |
| NGG guide 7 | AAGAUUCACUUUCAUAAUGC | 451 | NGG | ABE/CBE | Intron 7; overlap with nusinersen site |
| NGG guide 8 | CUUACUUUUGUAAAACUUUA | 452 | NGG | ABE/CBE | Intron 7; at TIA1 site |
| NGG guide 9 | UUGUAAAACUUUAUGGUUUG | 453 | NGG | ABE | Intron 7; at TIAl site, one rat transition |
| NGG guide 10 | UCAGAUGUUAGAAAGUUGAA | 454 | NGG | ABE | Intron 7; hnRNP site |
| NGG guide 11 | AUUUUGUCUAAAACCCUGUA | 455 | NGG | ABE | Exon 7, C6U site |
| NGA guide 1 | AAAAAGCAUUUUGUUUCACA | 456 | NGA | ABE/CBE | Intron 6, several transitions to rat SMN1 |
| NGA guide 2 | AAAAUAAGUAAAAUGUCUUG | 457 | NGA | ABE | Intron 6 ahead of element 1 |
| NGA guide 3 | AUAUAUAGAUAGCUUUAUAU | 458 | NGA | ABE | Intron 6, transitions to rat/cyno SMN1 |
| NGA guide 4 | AGAUAUAGAUAGCUAUAUAU | 459 | NGA | ABE | Intron 6, several transitions to rat SMN1 |
| NGA guide 5 | AAAAAUAGCUAUAUAGAUAU | 460 | NGA | ABE/CBE | Intron 6, several transitions to rat SMN1 |
| NGA guide 6 | GUUAAAAAAAAUAGCUAUAU | 461 | NGA | ABE | Intron 6, several transitions to rat SMN1 |
| NGA guide 8 | UUUUGUCUAAAACCCUGUAA | 462 | NGA | ABE | Another Exon 7 C6U guide |
| NGA guide 9 | UUCACUUUCAUAAUGCUGGC | 463 | NGA | ABE/CBE | Intron 7; overlap with nusinersen site |
| NGA guide 10 | GAGUAAGUCUGCCAGCAUUA | 464 | NGA | ABE/CBE | Intron 7; just upstream of nusinersen |
| NGA guide 11 | CAUAAAGUUUUACAAAAGUA | 465 | NGA | ABE | Intron 7; at TIA1 site |
| NGA guide 12 | UGUAAAACUUUAUGGUUUGU | 466 | NGA | ABE | Intron 7; at TIAl site, one rat transition |
| NGA guide 13 | UUGUGGAAAACAAAUGUUUU | 467 | NGA | ABE | Intron 7; at Element 2 |
| NGA guide 14 | CCUUUCAACUUUCUAACAUC | 468 | NGA | ABE/CBE | Intron 7; rat transition |
| NGA guide 15 | AUUUAAAAAGUUCAGAUGUU | 469 | NGA | ABE | Intron 7 |
| NGA guide 16 | UUUGAACAUUUAAAAAGUUC | 470 | NGA | ABE/CBE | Intron 7; URC3 site |
| NGA guide 17 | AAGUUCAGAUGUUAGAAAGU | 471 | NGA | ABE/CBE | Intron 7; rat transition |
| NGA guide 18 | GUCUGCCAGCAUUAUGAAAG | 472 | NGA | CBE | Intron 7; C10 site |
| NNGRRT guide | GCUAUAUAUAGAUAGCUUUAU | 473 | NNGRRT | ABE | Intron 6 |
| 1 | | | (Sa) | | |
| NNGRRT guide | UAACUUCCUUUAUUUUCCUUA | 474 | NNGRRT | CBE | Intron 6; rat transition |
| 2 | | | (Sa) | | |
| NNGRRT guide | GCAGACUUACUCCUUAAUUUA | 475 | NNGRRT | CBE | Intron 7; rat transition |
| 3 | | | (Sa) | | |
| NNGRRT guide | AAGUCUGCCAGCAUUAUGAAA | 476 | NNGRRT | ABE/CBE | Intron 7; overlap with nusinersen site |
| 4 | | | (Sa) | | |
| NNNRRT guide | UAAGUAAAAUGUCUUGUGAAA | 477 | NNNRRT | ABE | Intron 6 |
| 1 | | | (SaKKH) | | |
| NNNRRT guide | UAUAGAUAUAGAUAGCUAUAU | 478 | NNNRRT | ABE | Intron 6, transition to rat SMN1 |
| 2 | | | (SaKKH) | | |
| NNNRRT guide | AAAAAAAAUAGCUAUAUAGAU | 479 | NNNRRT | ABE | Intron 6, transition to rat SMN1 |
| 3 | | | (SaKKH) | | |
| NNNRRT guide | AAACCCUGUAAGGAAAAUAAA | 480 | NNNRRT | ABE/CBE | intron/exon junction; hnRNP binding site |
| 4 | | | (SaKKH) | | |
| NNNRRT guide | UUUUGUCUAAAACCCUGUAAG | 481 | NNNRRT | ABE | Another Exon 7 C6U guide |
| 5 | | | (SaKKH) | | |
| NNNRRT guide | AUAAUGCUGGCAGACUUACUC | 482 | NNNRRT | ABE/CBE | Intron 7; overlap with nusinersen site |
| 6 | | | (SaKKH) | | |
| NNNRRT guide | UACAAAAGUAAGAUUCACUUU | 483 | NNNRRT | ABE | Intron 7; rat transition |
| 7 | | | (SaKKH) | | |
| NNNRRT guide | AACCAUAAAGUUUUACAAAAG | 484 | NNNRRT | ABE | Intron 7; rat transition |
| 8 | | | (SaKKH) | | |
| NNNRRT guide | AAUCUUACUUUUGUAAAACUU | 485 | NNNRRT | ABE/CBE | Intron 7; at TIA1 site |
| 9 | | | (SaKKH) | | |
| NNNRRT guide | CCACAAACCAUAAAGUUUUAC | 486 | NNNRRT | ABE/CBE | Intron 7; at TIA1 site, rat transitions |
| 10 | | | (SaKKH) | | |
| NNNRRT guide | ACAUUUGUUUUCCACAAACCA | 487 | NNNRRT | CBE | Intron 7; at Element 2 |
| 11 | | | (SaKKH) | | |
| NNNRRT guide | GUUUUUGAACAUUUAAAAAGU | 488 | NNNRRT | ABE/CBE | Intron 7; URC3 site |
| 12 | | | (SaKKH) | | |
| NNNRRT guide | AUUUAAAAAGUUCAGAUGUUA | 489 | NNNRRT | ABE | Intron 7 |
| 13 | | | (SaKKH) | | |
| NNNRRT guide | AGUUCAGAUGUUAGAAAGUUG | 490 | NNNRRT | ABE | Intron 7; rat transition |
| 14 | | | (SaKKH) | | |
| NNNRRT guide | CAGAUGUUAGAAAGUUGAAAG | 491 | NNNRRT | ABE | Intron 7; hnRNP site |
| 15 | | | (SaKKH) | | |
| NNNRRT guide | AAAGUUGAAAGGUUAAUGUAA | 492 | NNNRRT | ABE | Intron 7; rat transition |
| 16 | | | (SaKKH) | | |
| NNNRRT guide | GAGUAAGUCUGCCAGCAUUAU | 493 | NNNRRT | CBE | Intron 7; overlap with nusinersen site |
| 17 | | | (SaKKH) | | |
| NNNRRT guide | GAAGUUAAAAAAAAUAGCUAU | 494 | NNNRRT | ABE | Intron 6 |
| 18 | | | (SaKKH) | | |
| NNNRRT guide | AGGAAAAUAAAGGAAGUUAAA | 495 | NNNRRT | ABE | Intron 6; hnRNP site |
| 19 | | | (SaKKH) | | |
| NNNRRT guide | AAACUUUAUGGUUUGUGGAAA | 496 | NNNRRT | ABE | Intron 7; at TIA1 site |
| 20 | | | (SaKKH) | | |
| NGC guide 1 | AUUUUGUCUAAAACCCUGUA | 497 | NGC | ABE | Exon 7 A54 site |
| NGC guide 2 | AAUUAAGGAGUAAGUCUGCC | 498 | NGC | ABE | Exon 7 A54 site |

TABLE 2B
Exemplary guide polynucleotide sequences and measured maximum editing efficiencies (C > T% and
A > G%) measured for base editor systems containing guide polynucleotides containing the listed
guide polynucleotide sequences and a cytidine base editor (CBE; C > T) or an adenosine base
editor (ABE; A > G). In Table 2B, mN = 2′-OMe; Ns = phosphorothioate (PS), where “N” represents
the any nucleotide, as would be understood by one having skill in the art. In some cases, a
nucleotide (N) may contain two modifications, for example, both a 2'-OMe and a PS modification.
For example, a nucleotide with a phosphorothioate and 2' OMe is denoted as “mNs;” when there
are two modifications next to each other, the notation is “mNsmNs.

| | Alternative | | | | |
|---|---|---|---|---|---|
| Guide | Guide | | SEQ | Max | Max |
| Name | Name | sgRNA Nucleotide Sequence | ID NO | A > G% | C > T% |
| gRNA1958 | TSBTx4905 | mUsmUsmAsUUCAACAAAAUAUGAUCGUUUUAGAGCUAG | 499 | 2.7 | 10.1 |
| | | AAAUAGCAAGUUAAAAUAAGGCUAGUCCGUUAUCAACUU | | | |
| | | GAAAAAGUGGCACCGAGUCGGUGCmUsmUsmUsU | | | |
| gRNA1959 | TSBTx4906 | mAsmAsmCsCCUGUAAGGAAAAUAAAGUUUUAGAGCUAG | 500 | 17.3 | 10.9 |
| | | AAAUAGCAAGUUAAAAUAAGGCUAGUCCGUUAUCAACUU | | | |
| | | GAAAAAGUGGCACCGAGUCGGUGCmUsmUsmUsU | | | |
| gRNA1960 | TSBTx4907 | mUsmUsmUsUGUCUAAAACCCUGUAAGUUUUAGAGCUAG | 501 | 5.6 | 38.9 |
| | | AAAUAGCAAGUUAAAAUAAGGCUAGUCCGUUAUCAACUU | | | |
| | | GAAAAAGUGGCACCGAGUCGGUGCmUsmUsmUsU | | | |
| gRNA1961 | TSBTx4908 | mGsmUsmGsAGCACCUUCCUUCUUUUGUUUUAGAGCUAG | 502 | 20.8 | 4.4 |
| | | AAAUAGCAAGUUAAAAUAAGGCUAGUCCGUUAUCAACUU | | | |
| | | GAAAAAGUGGCACCGAGUCGGUGCmUsmUsmUsU | | | |
| gRNA1962 | TSBTx4909 | mAsmCsmUsCCUUAAUUUAAGGAAUGGUUUUAGAGCUAG | 503 | 56.1 | 71.6 |
| | | AAAUAGCAAGUUAAAAUAAGGCUAGUCCGUUAUCAACUU | | | |
| | | GAAAAAGUGGCACCGAGUCGGUGCmUsmUsmUsU | | | |
| gRNA1963 | TSBTx4910 | mAsmGsmAsCUUACUCCUUAAUUUAAGUUUUAGAGCUAG | 504 | 14.8 | 2.2 |
| | | AAAUAGCAAGUUAAAAUAAGGCUAGUCCGUUAUCAACUU | | | |
| | | GAAAAAGUGGCACCGAGUCGGUGCmUsmUsmUsU | | | |
| gRNA1964 | TSBTx4911 | mUsmAsmUsUUUCCUUACAGGGUUUUGUUUUAGAGCUAG | 505 | 0.5 | 9.5 |
| | | AAAUAGCAAGUUAAAAUAAGGCUAGUCCGUUAUCAACUU | | | |
| | | GAAAAAGUGGCACCGAGUCGGUGCmUsmUsmUsU | | | |
| gRNA1965 | TSBTx4912 | mUsmUsmAsGACAAAAUCAAAAAGAAGUUUUAGAGCUAG | 506 | 16.3 | 4.1 |
| | | AAAUAGCAAGUUAAAAUAAGGCUAGUCCGUUAUCAACUU | | | |
| | | GAAAAAGUGGCACCGAGUCGGUGCmUsmUsmUsU | | | |
| gRNA1966 | TSBTx4913 | mGsmCsmUsCACAUUCCUUAAAUUAAGUUUUAGAGCUAG | 507 | 66.9 | 72.9 |
| | | AAAUAGCAAGUUAAAAUAAGGCUAGUCCGUUAUCAACUU | | | |
| | | GAAAAAGUGGCACCGAGUCGGUGCmUsmUsmUsU | | | |
| gRNA1967 | TSBTx4914 | mGsmAsmGsUAAGUCUGCCAGCAUUAGUUUUAGAGCUAG | 508 | 41.4 | 5.2 |
| | | AAAUAGCAAGUUAAAAUAAGGCUAGUCCGUUAUCAACUU | | | |
| | | GAAAAAGUGGCACCGAGUCGGUGCmUsmUsmUsU | | | |
| gRNA1968 | TSBTx4915 | mUsmCsmCsUUAAUUUAAGGAAUGUGGUUUUAGAGCUAG | 509 | | 1.1 |
| | | AAAUAGCAAGUUAAAAUAAGGCUAGUCCGUUAUCAACUU | | | |
| | | GAAAAAGUGGCACCGAGUCGGUGCmUsmUsmUsU | | | |
| gRNA1969 | TSBTx4916 | mCsmUsmUsAAAUUAAGGAGUAAGUCGUUUUAGAGCUAG | 510 | | 0.2 |
| | | AAAUAGCAAGUUAAAAUAAGGCUAGUCCGUUAUCAACUU | | | |
| | | GAAAAAGUGGCACCGAGUCGGUGCmUsmUsmUsU | | | |
| gRNA1970 | TSBTx4917 | mAsmAsmAsCCCUGUAAGGAAAAUAAGUUUUAGAGCUAG | 511 | 41.4 | 2.1 |
| | | AAAUAGCAAGUUAAAAUAAGGCUAGUCCGUUAUCAACUU | | | |
| | | GAAAAAGUGGCACCGAGUCGGUGCmUsmUsmUsU | | | |
| gRNA1971 | TSBTx4918 | mCsmAsmGsACUUACUCCUUAAUUUAGUUUUAGAGCUAG | 512 | 66.6 | 6.3 |
| | | AAAUAGCAAGUUAAAAUAAGGCUAGUCCGUUAUCAACUU | | | |
| | | GAAAAAGUGGCACCGAGUCGGUGCmUsmUsmUsU | | | |
| gRNA1972 | TSBTx4919 | mUsmUsmUsAGACAAAAUCAAAAAGAGUUUUAGAGCUAG | 513 | 62.5 | 2.7 |
| | | AAAUAGCAAGUUAAAAUAAGGCUAGUCCGUUAUCAACUU | | | |
| | | GAAAAAGUGGCACCGAGUCGGUGCmUsmUsmUsU | | | |
| gRNA1973 | TSBTx4920 | mGsmAsmCsAAAAUCAAAAAGAAGGAGUUUUAGAGCUAG | 514 | 52.1 | 2.7 |
| | | AAAUAGCAAGUUAAAAUAAGGCUAGUCCGUUAUCAACUU | | | |
| | | GAAAAAGUGGCACCGAGUCGGUGCmUsmUsmUsU | | | |
| gRNA1974 | TSBTx4921 | mUsmGsmCsUCACAUUCCUUAAAUUAGUUUUAGAGCUAG | 515 | 67 | 28.5 |
| | | AAAUAGCAAGUUAAAAUAAGGCUAGUCCGUUAUCAACUU | | | |
| | | GAAAAAGUGGCACCGAGUCGGUGCmUsmUsmUsU | | | |
| gRNA1975 | TSBTx4922 | mGsmCsmUsAUAUAUAGAUAGCUUUAUGUUUUAGUACUC | 516 | 53 | 0.6 |
| | | UGUAAUGAAAAUUACAGAAUCUACUAAAACAAGGCAAAA | | | |
| | | UGCCGUGUUUAUCUCGUCAACUUGUUGGCGAGAUsmUsm | | | |
| | | UsmU | | | |
| gRNA1976 | TSBTx4923 | mGsmCsmAsGACUUACUCCUUAAUUUAGUUUUAGUACUC | 517 | 35.7 | 61.1 |
| | | UGUAAUGAAAAUUACAGAAUCUACUAAAACAAGGCAAAA | | | |
| | | UGCCGUGUUUAUCUCGUCAACUUGUUGGCGAGAUsmUsm | | | |
| | | UsmU | | | |
| gRNA1977 | TSBTx4924 | mGsmUsmGsCUCACAUUCCUUAAAUUAGUUUUAGUACUC | 518 | 27.7 | 59.7 |
| | | UGUAAUGAAAAUUACAGAAUCUACUAAAACAAGGCAAAA | | | |
| | | UGCCGUGUUUAUCUCGUCAACUUGUUGGCGAGAUsmUsm | | | |
| | | UsmU | | | |
| gRNA1978 | TSBTx4925 | mUsmAsmCsUUAUUUUAUUCAACAAAAGUUUUAGUACUC | 519 | 0 | 0 |
| | | UGUAAUGAAAAUUACAGAAUCUACUAAAACAAGGCAAAA | | | |
| | | UGCCGUGUUUAUCUCGUCAACUUGUUGGCGAGAUsmUsm | | | |
| | | UsmU | | | |
| gRNA1979 | TSBTx4926 | mCsmAsmUsUUUACUUAUUUUAUUCAAGUUUUAGUACUC | 520 | 0 | 0.2 |
| | | UGUAAUGAAAAUUACAGAAUCUACUAAAACAAGGCAAAA | | | |
| | | UGCCGUGUUUAUCUCGUCAACUUGUUGGCGAGAUsmUsm | | | |
| | | UsmU | | | |
| gRNA1980 | TSBTx4927 | mAsmAsmAsAAAAAUAGCUAUAUAGAUGUUUUAGUACUC | 521 | 0.5 | 0 |
| | | UGUAAUGAAAAUUACAGAAUCUACUAAAACAAGGCAAAA | | | |
| | | UGCCGUGUUUAUCUCGUCAACUUGUUGGCGAGAUsmUsm | | | |
| | | UsmU | | | |
| gRNA1981 | TSBTx4928 | mAsmAsmAsCCCUGUAAGGAAAAUAAAGUUUUAGUACUC | 522 | 45.5 | 12.7 |
| | | UGUAAUGAAAAUUACAGAAUCUACUAAAACAAGGCAAAA | | | |
| | | UGCCGUGUUUAUCUCGUCAACUUGUUGGCGAGAUsmUsm | | | |
| | | UsmU | | | |
| gRNA1982 | TSBTx4929 | mUsmUsmUsUGUCUAAAACCCUGUAAGGUUUUAGUACUC | 523 | 17.1 | 48.6 |
| | | UGUAAUGAAAAUUACAGAAUCUACUAAAACAAGGCAAAA | | | |
| | | UGCCGUGUUUAUCUCGUCAACUUGUUGGCGAGAUsmUsm | | | |
| | | UsmU | | | |
| gRNA1983 | TSBTx4930 | mAsmAsmUsGUGAGCACCUUCCUUCUUGUUUUAGUACUC | 524 | 0 | 0.3 |
| | | UGUAAUGAAAAUUACAGAAUCUACUAAAACAAGGCAAAA | | | |
| | | UGCCGUGUUUAUCUCGUCAACUUGUUGGCGAGAUsmUsm | | | |
| | | UsmU | | | |
| gRNA1984 | TSBTx4931 | mAsmUsmAsAUGCUGGCAGACUUACUCGUUUUAGUACUC | 525 | 3.4 | 1.3 |
| | | UGUAAUGAAAAUUACAGAAUCUACUAAAACAAGGCAAAA | | | |
| | | UGCCGUGUUUAUCUCGUCAACUUGUUGGCGAGAUsmUsm | | | |
| | | UsmU | | | |
| gRNA1985 | TSBTx4932 | mUsmUsmCsUGAUCAUAUUUUGUUGAAGUUUUAGUACUC | 526 | 0 | 0 |
| | | UGUAAUGAAAAUUACAGAAUCUACUAAAACAAGGCAAAA | | | |
| | | UGCCGUGUUUAUCUCGUCAACUUGUUGGCGAGAUsmUsm | | | |
| | | UsmU | | | |
| gRNA1986 | TSBTx4933 | mGsmAsmUsCAUAUUUUGUUGAAUAAAGUUUUAGUACUC | 527 | 0.2 | 0 |
| | | UGUAAUGAAAAUUACAGAAUCUACUAAAACAAGGCAAAA | | | |
| | | UGCCGUGUUUAUCUCGUCAACUUGUUGGCGAGAUsmUsm | | | |
| | | UsmU | | | |
| gRNA1987 | TSBTx4934 | mUsmAsmUsUUUGUUGAAUAAAAUAAGGUUUUAGUACUC | 528 | 1.6 | 0 |
| | | UGUAAUGAAAAUUACAGAAUCUACUAAAACAAGGCAAAA | | | |
| | | UGCCGUGUUUAUCUCGUCAACUUGUUGGCGAGAUsmUsm | | | |
| | | UsmU | | | |
| gRNA1988 | TSBTx4935 | mUsmAsmAsGUAAAAUGUCUUGUGAAAGUUUUAGUACUC | 529 | 0 | 0.1 |
| | | UGUAAUGAAAAUUACAGAAUCUACUAAAACAAGGCAAAA | | | |
| | | UGCCGUGUUUAUCUCGUCAACUUGUUGGCGAGAUsmUsm | | | |
| | | UsmU | | | |
| gRNA1989 | TSBTx4936 | mUsmUsmUsUCCUUACAGGGUUUUAGAGUUUUAGUACUC | 530 | 28.5 | 36.9 |
| | | UGUAAUGAAAAUUACAGAAUCUACUAAAACAAGGCAAAA | | | |
| | | UGCCGUGUUUAUCUCGUCAACUUGUUGGCGAGAUsmUsm | | | |
| | | UsmU | | | |
| gRNA1990 | TSBTx4937 | mUsmUsmAsGACAAAAUCAAAAAGAAGGUUUUAGUACUC | 531 | 2.9 | 24.5 |
| | | UGUAAUGAAAAUUACAGAAUCUACUAAAACAAGGCAAAA | | | |
| | | UGCCGUGUUUAUCUCGUCAACUUGUUGGCGAGAUsmUsm | | | |
| | | UsmU | | | |
| gRNA1991 | TSBTx4938 | mGsmAsmAsGGAAGGUGCUCACAUUCCGUUUUAGUACUC | 532 | 0.2 | 5.8 |
| | | UGUAAUGAAAAUUACAGAAUCUACUAAAACAAGGCAAAA | | | |
| | | UGCCGUGUUUAUCUCGUCAACUUGUUGGCGAGAUsmUsm | | | |
| | | UsmU | | | |
| gRNA1992 | TSBTx4939 | mUsmCsmAsCAUUCCUUAAAUUAAGGAGUUUUAGUACUC | 533 | 22.6 | 57.4 |
| | | UGUAAUGAAAAUUACAGAAUCUACUAAAACAAGGCAAAA | | | |
| | | UGCCGUGUUUAUCUCGUCAACUUGUUGGCGAGAUsmUsm | | | |
| | | UsmU | | | |
| gRNA2013 | TSBTx4966 | mUsmUsmCsACUUUCAUAAUGCUGGCGUUUUAGAGCUAG | 534 | 0 | 0.1 |
| | | AAAUAGCAAGUUAAAAUAAGGCUAGUCCGUUAUCAACUU | | | |
| | | GAAAAAGUGGCACCGAGUCGGUGCmUsmUsmUsU | | | |
| gRNA2014 | TSBTx4967 | mCsmCsmUsUUCAACUUUCUAACAUCGUUUUAGAGCUAG | 535 | | |
| | | AAAUAGCAAGUUAAAAUAAGGCUAGUCCGUUAUCAACUU | | | |
| | | GAAAAAGUGGCACCGAGUCGGUGCmUsmUsmUsU | | | |
| gRNA2015 | TSBTx4968 | mGsmUsmCsUGCCAGCAUUAUGAAAGGUUUUAGAGCUAG | 536 | 2.3 | 8.5 |
| | | AAAUAGCAAGUUAAAAUAAGGCUAGUCCGUUAUCAACUU | | | |
| | | GAAAAAGUGGCACCGAGUCGGUGCmUsmUsmUsU | | | |
| gRNA2016 | TSBTx4969 | mUsmGsmUsAAAACUUUAUGGUUUGUGUUUUAGAGCUAG | 537 | 0.7 | 0 |
| | | AAAUAGCAAGUUAAAAUAAGGCUAGUCCGUUAUCAACUU | | | |
| | | GAAAAAGUGGCACCGAGUCGGUGCmUsmUsmUsU | | | |
| gRNA2017 | TSBTx4970 | mAsmGsmAsUUCACUUUCAUAAUGCUGUUUUAGAGCUAG | 538 | | 38.5 |
| | | AAAUAGCAAGUUAAAAUAAGGCUAGUCCGUUAUCAACUU | | | |
| | | GAAAAAGUGGCACCGAGUCGGUGCmUsmUsmUsU | | | |
| gRNA2018 | TSBTx4971 | mAsmAsmUsUAAGGAGUAAGUCUGCCGUUUUAGAGCUAG | 539 | | 0.2 |
| | | AAAUAGCAAGUUAAAAUAAGGCUAGUCCGUUAUCAACUU | | | |
| | | GAAAAAGUGGCACCGAGUCGGUGCmUsmUsmUsU | | | |
| gRNA2019 | TSBTx4972 | mAsmAsmGsAUUCACUUUCAUAAUGCGUUUUAGAGCUAG | 540 | 56.1 | 15.3 |
| | | AAAUAGCAAGUUAAAAUAAGGCUAGUCCGUUAUCAACUU | | | |
| | | GAAAAAGUGGCACCGAGUCGGUGCmUsmUsmUsU | | | |
| gRNA2020 | TSBTx4973 | mUsmUsmGsUAAAACUUUAUGGUUUGGUUUUAGAGCUAG | 541 | 15.3 | 0 |
| | | AAAUAGCAAGUUAAAAUAAGGCUAGUCCGUUAUCAACUU | | | |
| | | GAAAAAGUGGCACCGAGUCGGUGCmUsmUsmUsU | | | |
| gRNA2021 | TSBTx4974 | mUsmCsmAsGAUGUUAGAAAGUUGAAGUUUUAGAGCUAG | 542 | 58.4 | 0.3 |
| | | AAAUAGCAAGUUAAAAUAAGGCUAGUCCGUUAUCAACUU | | | |
| | | GAAAAAGUGGCACCGAGUCGGUGCmUsmUsmUsU | | | |
| gRNA2022 | TSBTx4975 | mAsmAsmGsUCUGCCAGCAUUAUGAAAGUUUUAGUACUC | 543 | 12.2 | 23.8 |
| | | UGUAAUGAAAAUUACAGAAUCUACUAAAACAAGGCAAAA | | | |
| | | UGCCGUGUUUAUCUCGUCAACUUGUUGGCGAGAUsmUsm | | | |
| | | UsmU | | | |
| gRNA2023 | TSBTx4976 | mAsmAsmUsGUAAAACAAUCAAUAUUAGUUUUAGUACUC | 544 | 5.6 | 11.2 |
| | | UGUAAUGAAAAUUACAGAAUCUACUAAAACAAGGCAAAA | | | |
| | | UGCCGUGUUUAUCUCGUCAACUUGUUGGCGAGAUsmUsm | | | |
| | | UsmU | | | |
| gRNA2024 | TSBTx4977 | mUsmAsmCsAAAAGUAAGAUUCACUUUGUUUUAGUACUC | 545 | 0.1 | 0.1 |
| | | UGUAAUGAAAAUUACAGAAUCUACUAAAACAAGGCAAAA | | | |
| | | UGCCGUGUUUAUCUCGUCAACUUGUUGGCGAGAUsmUsm | | | |
| | | UsmU | | | |
| gRNA2025 | TSBTx4978 | mCsmCsmAsCAAACCAUAAAGUUUUACGUUUUAGUACUC | 546 | 45.1 | 44.4 |
| | | UGUAAUGAAAAUUACAGAAUCUACUAAAACAAGGCAAAA | | | |
| | | UGCCGUGUUUAUCUCGUCAACUUGUUGGCGAGAUsmUsm | | | |
| | | UsmU | | | |
| gRNA2026 | TSBTx4979 | mAsmCsmAsUUUGUUUUCCACAAACCAGUUUUAGUACUC | 547 | 9.8 | 54.4 |
| | | UGUAAUGAAAAUUACAGAAUCUACUAAAACAAGGCAAAA | | | |
| | | UGCCGUGUUUAUCUCGUCAACUUGUUGGCGAGAUsmUsm | | | |
| | | UsmU | | | |
| gRNA2027 | TSBTx4980 | mGsmAsmGsUAAGUCUGCCAGCAUUAUGUUUUAGUACUC | 548 | 16.1 | 64.7 |
| | | UGUAAUGAAAAUUACAGAAUCUACUAAAACAAGGCAAAA | | | |
| | | UGCCGUGUUUAUCUCGUCAACUUGUUGGCGAGAUsmUsm | | | |
| | | UsmU | | | |
| gRNA2028 | TSBTx4981 | mAsmAsmUsCUUACUUUUGUAAAACUUGUUUUAGUACUC | 549 | 0 | 0.1 |
| | | UGUAAUGAAAAUUACAGAAUCUACUAAAACAAGGCAAAA | | | |
| | | UGCCGUGUUUAUCUCGUCAACUUGUUGGCGAGAUsmUsm | | | |
| | | UsmU | | | |
| gRNA2029 | TSBTx4982 | mAsmAsmAsCUUUAUGGUUUGUGGAAAGUUUUAGUACUC | 550 | 0.7 | 0 |
| | | UGUAAUGAAAAUUACAGAAUCUACUAAAACAAGGCAAAA | | | |
| | | UGCCGUGUUUAUCUCGUCAACUUGUUGGCGAGAUsmUsm | | | |
| | | UsmU | | | |
| gRNA2030 | TSBTx4983 | mAsmCsmAsAAUGUUUUUGAACAUUUAGUUUUAGUACUC | 551 | 1.1 | 0.6 |
| | | UGUAAUGAAAAUUACAGAAUCUACUAAAACAAGGCAAAA | | | |
| | | UGCCGUGUUUAUCUCGUCAACUUGUUGGCGAGAUsmUsm | | | |
| | | UsmU | | | |
| gRNA2031 | TSBTx4984 | mGsmUsmUsUUUGAACAUUUAAAAAGUGUUUUAGUACUC | 552 | 0 | 0.1 |
| | | UGUAAUGAAAAUUACAGAAUCUACUAAAACAAGGCAAAA | | | |
| | | UGCCGUGUUUAUCUCGUCAACUUGUUGGCGAGAUsmUsm | | | |
| | | UsmU | | | |
| gRNA2032 | TSBTx4985 | mAsmUsmUsUAAAAAGUUCAGAUGUUAGUUUUAGUACUC | 553 | 1.2 | 13 |
| | | UGUAAUGAAAAUUACAGAAUCUACUAAAACAAGGCAAAA | | | |
| | | UGCCGUGUUUAUCUCGUCAACUUGUUGGCGAGAUsmUsm | | | |
| | | UsmU | | | |
| gRNA2033 | TSBTx4986 | mAsmGsmUsUCAGAUGUUAGAAAGUUGGUUUUAGUACUC | 554 | 4.6 | 11.5 |
| | | UGUAAUGAAAAUUACAGAAUCUACUAAAACAAGGCAAAA | | | |
| | | UGCCGUGUUUAUCUCGUCAACUUGUUGGCGAGAUsmUsm | | | |
| | | UsmU | | | |
| gRNA2034 | TSBTx4987 | mCsmAsmGsAUGUUAGAAAGUUGAAAGGUUUUAGUACUC | 555 | 0.2 | 0.1 |
| | | UGUAAUGAAAAUUACAGAAUCUACUAAAACAAGGCAAAA | | | |
| | | UGCCGUGUUUAUCUCGUCAACUUGUUGGCGAGAUsmUsm | | | |
| | | UsmU | | | |
| gRNA2035 | TSBTx4988 | mAsmAsmAsGUUGAAAGGUUAAUGUAAGUUUUAGUACUC | 556 | 0.6 | 0 |
| | | UGUAAUGAAAAUUACAGAAUCUACUAAAACAAGGCAAAA | | | |
| | | UGCCGUGUUUAUCUCGUCAACUUGUUGGCGAGAUsmUsm | | | |
| | | UsmU | | | |
| gRNA2036 | TSBTx4989 | mUsmUsmGsAAAGGUUAAUGUAAAACAGUUUUAGUACUC | 557 | 1.9 | 0 |
| | | UGUAAUGAAAAUUACAGAAUCUACUAAAACAAGGCAAAA | | | |
| | | UGCCGUGUUUAUCUCGUCAACUUGUUGGCGAGAUsmUsm | | | |
| | | UsmU | | | |
| gRNA2345 | TSBTx5227 | mGsmUsmCsUAAAACCCUGUAAGGAAGUUUUAGAGCUAGAAAU | 629 | | |
| | | AGCAAGUUAAAAUAAGGCUAGUCCGUUAUCAACUUGAAAAAGU | | | |
| | | GGCACCGAGUCGGUGCmUsmUsmUsU | | | |
| gRNA2349 | TSBTx5234 | mUsmUsmAsAGGAGUAAGUCUGCCAGGUUUUAGAGCUAGAAAU | 630 | | |
| | | AGCAAGUUAAAAUAAGGCUAGUCCGUUAUCAACUUGAAAAAGU | | | |
| | | GGCACCGAGUCGGUGCmUsmUsmUsU | | | |
| gRNA2352 | TSBTx5238 | mAsmAsmGsUCUGCCAGCAUUAUGAAGUUUUAGAGCUAGAAAU | 631 | | |
| | | AGCAAGUUAAAAUAAGGCUAGUCCGUUAUCAACUUGAAAAAGU | | | |
| | | GGCACCGAGUCGGUGCmUsmUsmUsU | | | |
| gRNA2354 | TSBTx5242 | mCsmUsmGsCCAGCAUUAUGAAAGUGGUUUUAGAGCUAGAAAU | 632 | | |
| | | AGCAAGUUAAAAUAAGGCUAGUCCGUUAUCAACUUGAAAAAGU | | | |
| | | GGCACCGAGUCGGUGCmUsmUsmUsU | | | |

TABLE 2C
Exemplary spacer sequences.

| | Alternative | | SEQ ID | |
|---|---|---|---|---|
| Guide Name | Guide Name | Spacer Sequence | NO | PAM Sequence |
| gRNA1958 | TSBTx4905 | UUAUUCAACAAAAUAUGAUC | 558 | AGA |
| gRNA1959 | TSBTx4906 | AACCCUGUAAGGAAAAUAAA | 559 | GGA |
| gRNA1960 | TSBTx4907 | UUUUGUCUAAAACCCUGUAA | 560 | GGA |
| gRNA1961 | TSBTx4908 | GUGAGCACCUUCCUUCUUUU | 561 | TGA |
| gRNA1962 | TSBTx4909 | ACUCCUUAAUUUAAGGAAUG | 562 | TGA |
| gRNA1963 | TSBTx4910 | AGACUUACUCCUUAAUUUAA | 563 | GGA |
| gRNA1964 | TSBTx4911 | UAUUUUCCUUACAGGGUUUU | 564 | AGA |
| gRNA1965 | TSBTx4912 | UUAGACAAAAUCAAAAAGAA | 565 | GGA |
| gRNA1966 | TSBTx4913 | GCUCACAUUCCUUAAAUUAA | 566 | GGA |
| gRNA1967 | TSBTx4914 | GAGUAAGUCUGCCAGCAUUA | 567 | TGA |
| gRNA1968 | TSBTx4915 | UCCUUAAUUUAAGGAAUGUG | 568 | AGC |
| gRNA1969 | TSBTx4916 | CUUAAAUUAAGGAGUAAGUC | 569 | TGC |
| gRNA1970 | TSBTx4917 | AAACCCUGUAAGGAAAAUAA | 570 | AGG |
| gRNA1971 | TSBTx4918 | CAGACUUACUCCUUAAUUUA | 571 | AGG |
| gRNA1972 | TSBTx4919 | UUUAGACAAAAUCAAAAAGA | 572 | AGG |
| gRNA1973 | TSBTx4920 | GACAAAAUCAAAAAGAAGGA | 573 | AGG |
| gRNA1974 | TSBTx4921 | UGCUCACAUUCCUUAAAUUA | 574 | AGG |
| gRNA1975 | TSBTx4922 | GCUAUAUAUAGAUAGCUUUAU | 575 | ATGGAT |
| gRNA1976 | TSBTx4923 | GCAGACUUACUCCUUAAUUUA | 576 | AGGAAT |
| gRNA1977 | TSBTx4924 | GUGCUCACAUUCCUUAAAUUA | 577 | AGGAGT |
| gRNA1978 | TSBTx4925 | UACUUAUUUUAUUCAACAAAA | 578 | TATGAT |
| gRNA1979 | TSBTx4926 | CAUUUUACUUAUUUUAUUCAA | 579 | CAAAAT |
| gRNA1980 | TSBTx4927 | AAAAAAAAUAGCUAUAUAGAU | 580 | ATAGAT |
| gRNA1981 | TSBTx4928 | AAACCCUGUAAGGAAAAUAAA | 581 | GGAAGT |
| gRNA1982 | TSBTx4929 | UUUUGUCUAAAACCCUGUAAG | 582 | GAAAAT |
| gRNA1983 | TSBTx4930 | AAUGUGAGCACCUUCCUUCUU | 583 | TTTGAT |
| gRNA1984 | TSBTx4931 | AUAAUGCUGGCAGACUUACUC | 584 | CTTAAT |
| gRNA1985 | TSBTx4932 | UUCUGAUCAUAUUUUGUUGAA | 585 | TAAAAT |
| gRNA1986 | TSBTx4933 | GAUCAUAUUUUGUUGAAUAAA | 586 | ATAAGT |
| gRNA1987 | TSBTx4934 | UAUUUUGUUGAAUAAAAUAAG | 587 | TAAAAT |
| gRNA1988 | TSBTx4935 | UAAGUAAAAUGUCUUGUGAAA | 588 | CAAAAT |
| gRNA1989 | TSBTx4936 | UUUUCCUUACAGGGUUUUAGA | 589 | CAAAAT |
| gRNA1990 | TSBTx4937 | UUAGACAAAAUCAAAAAGAAG | 590 | GAAGGT |
| gRNA1991 | TSBTx4938 | GAAGGAAGGUGCUCACAUUCC | 591 | TTAAAT |
| gRNA1992 | TSBTx4939 | UCACAUUCCUUAAAUUAAGGA | 592 | GTAAGT |
| gRNA2013 | TSBTx4966 | UUCACUUUCAUAAUGCUGGC | 593 | AGA |
| gRNA2014 | TSBTx4967 | CCUUUCAACUUUCUAACAUC | 594 | TGA |
| gRNA2015 | TSBTx4968 | GUCUGCCAGCAUUAUGAAAG | 595 | TGA |
| gRNA2016 | TSBTx4969 | UGUAAAACUUUAUGGUUUGU | 596 | GGA |
| gRNA2017 | TSBTx4970 | AGAUUCACUUUCAUAAUGCU | 597 | GGC |
| gRNA2018 | TSBTx4971 | AAUUAAGGAGUAAGUCUGCC | 598 | AGC |
| gRNA2019 | TSBTx4972 | AAGAUUCACUUUCAUAAUGC | 599 | TGG |
| gRNA2020 | TSBTx4973 | UUGUAAAACUUUAUGGUUUG | 600 | TGG |
| gRNA2021 | TSBTx4974 | UCAGAUGUUAGAAAGUUGAA | 601 | AGG |
| gRNA2022 | TSBTx4975 | AAGUCUGCCAGCAUUAUGAAA | 602 | GTGAAT |
| gRNA2023 | TSBTx4976 | AAUGUAAAACAAUCAAUAUUA | 603 | AAGAAT |
| gRNA2024 | TSBTx4977 | UACAAAAGUAAGAUUCACUUU | 604 | CATAAT |
| gRNA2025 | TSBTx4978 | CCACAAACCAUAAAGUUUUAC | 605 | AAAAGT |
| gRNA2026 | TSBTx4979 | ACAUUUGUUUUCCACAAACCA | 606 | TAAAGT |
| gRNA2027 | TSBTx4980 | GAGUAAGUCUGCCAGCAUUAU | 607 | GAAAGT |
| gRNA2028 | TSBTx4981 | AAUCUUACUUUUGUAAAACUU | 608 | TATGGT |
| gRNA2029 | TSBTx4982 | AAACUUUAUGGUUUGUGGAAA | 609 | ACAAAT |
| gRNA2030 | TSBTx4983 | ACAAAUGUUUUUGAACAUUUA | 610 | AAAAGT |
| gRNA2031 | TSBTx4984 | GUUUUUGAACAUUUAAAAAGU | 611 | TCAGAT |
| gRNA2032 | TSBTx4985 | AUUUAAAAAGUUCAGAUGUUA | 612 | GAAAGT |
| gRNA2033 | TSBTx4986 | AGUUCAGAUGUUAGAAAGUUG | 613 | AAAGGT |
| gRNA2034 | TSBTx4987 | CAGAUGUUAGAAAGUUGAAAG | 614 | GTTAAT |
| gRNA2035 | TSBTx4988 | AAAGUUGAAAGGUUAAUGUAA | 615 | AACAAT |
| gRNA2036 | TSBTx4989 | UUGAAAGGUUAAUGUAAAACA | 616 | ATCAAT |
| gRNA2345 | TSBTx5227 | GUCUAAAACCCUGUAAGGAA | 625 | AATA |
| gRNA2349 | TSBTx5234 | UUAAGGAGUAAGUCUGCCAG | 626 | CATT |
| gRNA2352 | TSBTx5238 | AAGUCUGCCAGCAUUAUGAA | 627 | AG |
| gRNA2354 | TSBTx5242 | CUGCCAGCAUUAUGAAAGUG | 628 | AATC |

### Nucleobase Editors

[0206] Useful in the methods and compositions described herein are nucleobase editors that edit, modify or alter a target nucleotide sequence of a polynucleotide. Nucleobase editors described herein typically include a polynucleotide programmable nucleotide binding domain and a nucleobase editing domain (e.g., adenosine deaminase, cytidine deaminase, or a dual deaminase). A polynucleotide programmable nucleotide binding domain, when in conjunction with a bound guide polynucleotide (e.g., gRNA), can specifically bind to a target polynucleotide sequence and thereby localize the base editor to the target nucleic acid sequence desired to be edited.

[0207] In certain embodiments, the nucleobase editors provided herein comprise one or more features that improve base editing activity. For example, any of the nucleobase editors provided herein may comprise a Cas9 domain that has reduced nuclease activity. In some embodiments, any of the nucleobase editors provided herein may have a Cas9 domain that does not have nuclease activity (dCas9), or a Cas9 domain that cuts one strand of a duplexed DNA molecule, referred to as a Cas9 nickase (nCas9). Without wishing to be bound by any particular theory, the presence of the catalytic residue (e.g., H840) maintains the activity of the Cas9 to cleave the non-edited (e.g., non-deaminated) strand opposite the targeted nucleobase. Mutation of the catalytic residue (e.g., D10 to A10) prevents cleavage of the edited (e.g., deaminated) strand containing the targeted residue (e.g., A or C). Such Cas9 variants can generate a single-strand DNA break (nick) at a specific location based on the gRNA-defined target sequence, leading to repair of the non-edited strand, ultimately resulting in a nucleobase change on the non-edited strand.

### Polynucleotide Programmable Nucleotide Binding Domain

[0208] Polynucleotide programmable nucleotide binding domains bind polynucleotides (e.g., RNA, DNA). A polynucleotide programmable nucleotide binding domain of a base editor can itself comprise one or more domains (e.g., one or more nuclease domains). In some embodiments, the nuclease domain of a polynucleotide programmable nucleotide binding domain comprises an endonuclease or an exonuclease. An endonuclease can cleave a single strand of a double-stranded nucleic acid or both strands of a double-stranded nucleic acid molecule. In some embodiments, a nuclease domain of a polynucleotide programmable nucleotide binding domain can cut zero, one, or two strands of a target polynucleotide.

[0209] Non-limiting examples of a polynucleotide programmable nucleotide binding domain which can be incorporated into a base editor include a CRISPR protein-derived domain, a restriction nuclease, a meganuclease, TAL nuclease (TALEN), and a zinc finger nuclease (ZFN). In some embodiments, a base editor comprises a polynucleotide programmable nucleotide binding domain comprising a natural or modified protein or portion thereof which via a bound guide nucleic acid is capable of binding to a nucleic acid sequence during CRISPR (i.e., Clustered Regularly Interspaced Short Palindromic Repeats)-mediated modification of a nucleic acid. Such a protein is referred to herein as a “CRISPR protein.” Accordingly, disclosed herein is a base editor comprising a polynucleotide programmable nucleotide binding domain comprising all or a portion (e.g., a functional portion) of a CRISPR protein (i.e., a base editor comprising as a domain all or a portion (e.g., a functional portion) of a CRISPR protein, also referred to as a “CRISPR protein-derived domain” of the base editor). A CRISPR protein-derived domain incorporated into a base editor can be modified compared to a wild-type or natural version of the CRISPR protein. For example, as described below a CRISPR protein-derived domain can comprise one or more mutations, insertions, deletions, rearrangements and/or recombinations relative to a wild-type or natural version of the CRISPR protein.

[0210] Cas proteins that can be used herein include class 1 and class 2. Non-limiting examples of Cas proteins include Cas1, Cas1B, Cas2, Cas3, Cas4, Cas5, Cas5d, Cas5t, Cas5h, Cas5a, Cas6, Cas7, Cas8, Cas9 (also known as Csn1 or Csx12), Cas10, Csy1, Csy2, Csy3, Csy4, Cse1, Cse2, Cse3, Cse4, Cse5e, Csc1, Csc2, Csa5, Csn1, Csn2, Csm1, Csm2, Csm3, Csm4, Csm5, Csm6, Cmr1, Cmr3, Cmr4, Cmr5, Cmr6, Csb1, Csb2, Csb3, Csx17, Csx14, Csx10, Csx16, CsaX, Csx3, Csx1, Csx1S, Csf1, Csf2, CsO, Csf4, Csd1, Csd2, Cst1, Cst2, Csh1, Csh2, Csa1, Csa2, Csa3, Csa4, Csa5, Cas12a/Cpf1, Cas12b/C2c1 (e.g., SEQ ID NO: 232), Cas12c/C2c3, Cas12d/CasY, Cas12e/CasX, Cas12g, Cas12h, Cas12i, and Cas12j/CasΦ, CARF, DinG, homologues thereof, or modified versions thereof. A CRISPR enzyme can direct cleavage of one or both strands at a target sequence, such as within a target sequence and/or within a complement of a target sequence. For example, a CRISPR enzyme can direct cleavage of one or both strands within about 1, 2, 3, 4, 5, 6, 7, 8, 9, 10, 15, 20, 25, 50, 100, 200, 500, or more base pairs from the first or last nucleotide of a target sequence.

[0211] A vector that encodes a CRISPR enzyme that is mutated to with respect, to a corresponding wild-type enzyme such that the mutated CRISPR enzyme lacks the ability to cleave one or both strands of a target polynucleotide containing a target sequence can be used. A Cas protein (e.g., Cas9, Cas12) or a Cas domain (e.g., Cas9, Cas12) can refer to a polypeptide or domain with at least or at least about 50%, 60%, 70%, 80%, 90%, 91%, 92%, 93%, 94%, 95%, 96%, 97%, 98%, 99%, or 100% sequence identity and/or sequence homology to a wild-type exemplary Cas polypeptide or Cas domain. Cas (e.g., Cas9, Cas12) can refer to the wild-type or a modified form of the Cas protein that can comprise an amino acid change such as a deletion, insertion, substitution, variant, mutation, fusion, chimera, or any combination thereof. In some embodiments, a CRISPR protein-derived domain of a base editor can include all or a portion (e.g., a functional portion) of Cas9 from Corynebacterium ulcerans (NCBI Refs: NC_015683.1, NC_017317.1); Corynebacterium diphtheria (NCBI Refs: NC_016782.1, NC_016786.1); Spiroplasma syrphidicola (NCBI Ref: NC_021284.1); Prevotella intermedia (NCBI Ref: NC_017861.1); Spiroplasma taiwanense (NCBI Ref: NC_021846.1); Streptococcus iniae (NCBI Ref: NC_021314.1); Belliella baltica (NCBI Ref: NC_018010.1); Psychroflexus torquis (NCBI Ref: NC_018721.1); Streptococcus thermophilus (NCBI Ref: YP_820832.1); Listeria innocua (NCBI Ref: NP_472073.1); Campylobacter jejuni (NCBI Ref: YP_002344900.1); Neisseria meningitidis (NCBI Ref: YP_002342100.1), Streptococcus pyogenes, or Staphylococcus aureus.

[0212] Cas9 nuclease sequences and structures are well known to those of skill in the art (See, e.g., “Complete genome sequence of an M1 strain of Streptococcus pyogenes.” Ferretti et al., Proc. Natl. Acad. Sci. U.S.A. 98:4658-4663(2001); “CRISPR RNA maturation by trans-encoded small RNA and host factor RNase III.” Deltcheva E., et al., Nature 471:602-607(2011); and “A programmable dual-RNA-guided DNA endonuclease in adaptive bacterial immunity.” Jinek M., et al., Science 337:816-821(2012), the entire contents of each of which are incorporated herein by reference). Cas9 orthologs have been described in various species, including, but not limited to, S. pyogenes and S. thermophilus. Additional suitable Cas9 nucleases and sequences will be apparent to those of skill in the art based on this disclosure, and such Cas9 nucleases and sequences include Cas9 sequences from the organisms and loci disclosed in Chylinski, Rhun, and Charpentier, “The tracrRNA and Cas9 families of type II CRISPR-Cas immunity systems” (2013) RNA Biology 10:5, 726-737; the entire contents of which are incorporated herein by reference.

### High Fidelity Cas9 Domains

[0213] Some aspects of the disclosure provide high fidelity Cas9 domains. High fidelity Cas9 domains are known in the art and described, for example, in Kleinstiver, B. P., et al. “High-fidelity CRISPR-Cas9 nucleases with no detectable genome-wide off-target effects.” Nature 529, 490-495 (2016); and Slaymaker, I. M., et al. “Rationally engineered Cas9 nucleases with improved specificity.” Science 351, 84-88 (2015); the entire contents of each of which are incorporated herein by reference. An Exemplary high fidelity Cas9 domain is provided in the Sequence Listing as SEQ ID NO: 233. In some embodiments, high fidelity Cas9 domains are engineered Cas9 domains comprising one or more mutations that decrease electrostatic interactions between the Cas9 domain and the sugar-phosphate backbone of a DNA, relative to a corresponding wild-type Cas9 domain. High fidelity Cas9 domains that have decreased electrostatic interactions with the sugar-phosphate backbone of DNA have less off-target effects. In some embodiments, the Cas9 domain (e.g., a wild type Cas9 domain (SEQ ID NOs: 197 and 200) comprises one or more mutations that decrease the association between the Cas9 domain and the sugar-phosphate backbone of a DNA. In some embodiments, a Cas9 domain comprises one or more mutations that decreases the association between the Cas9 domain and the sugar-phosphate backbone of DNA by at least 1%, at least 2%, at least 3%, at least 4%, at least 5%, at least 10%, at least 15%, at least 20%, at least 25%, at least 30%, at least 35%, at least 40%, at least 45%, at least 50%, at least 55%, at least 60%, at least 65%, or at least 70%.

[0214] In some embodiments, any of the Cas9 fusion proteins or complexes provided herein comprise one or more of a D10A, N497X, a R661X, a Q695X, and/or a Q926X mutation, or a corresponding mutation in any of the amino acid sequences provided herein, wherein X is any amino acid. In some embodiments, the high fidelity Cas9 enzyme is SpCas9(K855A), eSpCas9(1.1), SpCas9-HF1, or hyper accurate Cas9 variant (HypaCas9). In some embodiments, the modified Cas9 eSpCas9(1.1) contains alanine substitutions that weaken the interactions between the HNH/RuvC groove and the non-target DNA strand, preventing strand separation and cutting at off-target sites. Similarly, SpCas9-HF1 lowers off-target editing through alanine substitutions that disrupt Cas9's interactions with the DNA phosphate backbone. HypaCas9 contains mutations (SpCas9 N692A/M694A/Q695A/H698A) in the REC3 domain that increase Cas9 proofreading and target discrimination. All three high fidelity enzymes generate less off-target editing than wildtype Cas9.

Cas9 Domains with Reduced Exclusivity

[0215] Typically, Cas9 proteins, such as Cas9 from S. pyogenes (spCas9), require a “protospacer adjacent motif (PAM)” or PAM-like motif, which is a 2-6 base pair DNA sequence immediately following the DNA sequence targeted by the Cas9 nuclease in the CRISPR bacterial adaptive immune system. The presence of an NGG PAM sequence is required to bind a particular nucleic acid region, where the “N” in “NGG” is adenosine (A), thymidine (T), or cytosine (C), and the G is guanosine. This may limit the ability to edit desired bases within a genome. In some embodiments, the base editing fusion proteins or complexes provided herein may need to be placed at a precise location, for example a region comprising a target base that is upstream of the PAM. See e.g., Komor, A. C., et al., “Programmable editing of a target base in genomic DNA without double-stranded DNA cleavage” Nature 533, 420-424 (2016), the entire contents of which are hereby incorporated by reference. Exemplary polypeptide sequences for spCas9 proteins capable of binding a PAM sequence are provided in the Sequence Listing as SEQ ID NOs: 197, 201, and 234-237. Accordingly, in some embodiments, any of the fusion proteins or complexes provided herein may contain a Cas9 domain that is capable of binding a nucleotide sequence that does not contain a canonical (e.g., NGG) PAM sequence. Cas9 domains that bind to non-canonical PAM sequences have been described in the art and would be apparent to the skilled artisan. For example, Cas9 domains that bind non-canonical PAM sequences have been described in Kleinstiver, B. P., et al., “Engineered CRISPR-Cas9 nucleases with altered PAM specificities” Nature 523, 481-485 (2015); and Kleinstiver, B. P., et al., “Broadening the targeting range of Staphylococcus aureus CRISPR-Cas9 by modifying PAM recognition” Nature Biotechnology 33, 1293-1298 (2015); the entire contents of each are hereby incorporated by reference.

### Nickases

[0216] In some embodiments, the polynucleotide programmable nucleotide binding domain comprises a nickase domain. Herein the term “nickase” refers to a polynucleotide programmable nucleotide binding domain comprising a nuclease domain that is capable of cleaving only one strand of the two strands in a duplexed nucleic acid molecule (e.g., DNA). In some embodiments, a nickase can be derived from a fully catalytically active (e.g., natural) form of a polynucleotide programmable nucleotide binding domain by introducing one or more mutations into the active polynucleotide programmable nucleotide binding domain. For example, where a polynucleotide programmable nucleotide binding domain comprises a nickase domain derived from Cas9, the Cas9-derived nickase domain can include a D10A mutation and a histidine at position 840. In such embodiments, the residue H840 retains catalytic activity and can thereby cleave a single strand of the nucleic acid duplex. In another example, a Cas9-derived nickase domain comprises an H840A mutation, while the amino acid residue at position 10 remains a D. In some embodiments, a nickase can be derived from a fully catalytically active (e.g., natural) form of a polynucleotide programmable nucleotide binding domain by removing all or a portion (e.g., a functional portion) of a nuclease domain that is not required for the nickase activity. For example, where a polynucleotide programmable nucleotide binding domain comprises a nickase domain derived from Cas9, the Cas9-derived nickase domain can comprise a deletion of all or a portion (e.g., a functional portion) of the RuvC domain or the HNH domain.

[0217] In some embodiments, wild-type Cas9 corresponds to, or comprises the following amino acid sequence:

(SEQ ID NO: 197)
[sequence omitted]

(single underline: HNH domain; double underline: RuvC domain).

[0218] In some embodiments, the strand of a nucleic acid duplex target polynucleotide sequence that is cleaved by a base editor comprising a nickase domain (e.g., Cas9-derived nickase domain, Cas12-derived nickase domain) is the strand that is not edited by the base editor (i.e., the strand that is cleaved by the base editor is opposite to a strand comprising a base to be edited). In other embodiments, a base editor comprising a nickase domain (e.g., Cas9-derived nickase domain, Cas12-derived nickase domain) can cleave the strand of a DNA molecule which is being targeted for editing. In such embodiments, the non-targeted strand is not cleaved.

[0219] In some embodiments, a Cas9 nuclease has an inactive (e.g., an inactivated) DNA cleavage domain, that is, the Cas9 is a nickase, referred to as an “nCas9” protein (for “nickase” Cas9). The Cas9 nickase may be a Cas9 protein that is capable of cleaving only one strand of a duplexed nucleic acid molecule (e.g., a duplexed DNA molecule). In some embodiments the Cas9 nickase cleaves the target strand of a duplexed nucleic acid molecule, meaning that the Cas9 nickase cleaves the strand that is base paired to (complementary to) a gRNA (e.g., an sgRNA) that is bound to the Cas9. In some embodiments, a Cas9 nickase comprises a D10A mutation and has a histidine at position 840. In some embodiments the Cas9 nickase cleaves the non-target, non-base-edited strand of a duplexed nucleic acid molecule, meaning that the Cas9 nickase cleaves the strand that is not base paired to a gRNA (e.g., an sgRNA) that is bound to the Cas9. In some embodiments, a Cas9 nickase comprises an H840A mutation and has an aspartic acid residue at position 10, or a corresponding mutation. In some embodiments the Cas9 nickase comprises an amino acid sequence that is at least 60%, at least 65%, at least 70%, at least 75%, at least 80%, at least 85%, at least 90%, at least 95%, at least 96%, at least 97%, at least 98%, at least 99%, or at least 99.5% identical to any one of the Cas9 nickases provided herein. Additional suitable Cas9 nickases will be apparent to those of skill in the art based on this disclosure and knowledge in the field and are within the scope of this disclosure.

[0220] The amino acid sequence of an exemplary catalytically Cas9 nickase (nCas9) is as follows:

(SEQ ID NO: 201)
MDKKYSIGLAIGTNSVGWAVITDEYKVPSKKFKVLGNTDRHSIKKNLIGALLFDSGETAEATRL
KRTARRRYTRRKNRICYLQEIFSNEMAKVDDSFFHRLEESFLVEEDKKHERHPIFGNIVDEVAY
HEKYPTIYHLRKKLVDSTDKADLRLIYLALAHMIKFRGHFLIEGDLNPDNSDVDKLFIQLVQTY
NQLFEENPINASGVDAKAILSARLSKSRRLENLIAQLPGEKKNGLFGNLIALSLGLTPNFKSNF
DLAEDAKLQLSKDTYDDDLDNLLAQIGDQYADLFLAAKNLSDAILLSDILRVNTEITKAPLSAS
MIKRYDEHHQDLTLLKALVRQQLPEKYKEIFFDQSKNGYAGYIDGGASQEEFYKFIKPILEKMD
GTEELLVKLNREDLLRKQRTFDNGSIPHQIHLGELHAILRRQEDFYPFLKDNREKIEKILTFRI
PYYVGPLARGNSRFAWMTRKSEETITPWNFEEVVDKGASAQSFIERMTNFDKNLPNEKVLPKHS
LLYEYFTVYNELTKVKYVTEGMRKPAFLSGEQKKAIVDLLFKTNRKVTVKQLKEDYFKKIECFD
SVEISGVEDRFNASLGTYHDLLKIIKDKDFLDNEENEDILEDIVLTLTLFEDREMIEERLKTYA
HLFDDKVMKQLKRRRYTGWGRLSRKLINGIRDKQSGKTILDFLKSDGFANRNFMQLIHDDSLTF
KEDIQKAQVSGQGDSLHEHIANLAGSPAIKKGILQTVKVVDELVKVMGRHKPENIVIEMARENQ
TTQKGQKNSRERMKRIEEGIKELGSQILKEHPVENTQLQNEKLYLYYLQNGRDMYVDQELDINR
LSDYDVDHIVPQSFLKDDSIDNKVLTRSDKNRGKSDNVPSEEVVKKMKNYWRQLLNAKLITQRK
FDNLTKAERGGLSELDKAGFIKRQLVETRQITKHVAQILDSRMNTKYDENDKLIREVKVITLKS
KLVSDFRKDFQFYKVREINNYHHAHDAYLNAVVGTALIKKYPKLESEFVYGDYKVYDVRKMIAK
SEQEIGKATAKYFFYSNIMNFFKTEITLANGEIRKRPLIETNGETGEIVWDKGRDFATVRKVLS
MPQVNIVKKTEVQTGGFSKESILPKRNSDKLIARKKDWDPKKYGGFDSPTVAYSVLVVAKVEKG
KSKKLKSVKELLGITIMERSSFEKNPIDFLEAKGYKEVKKDLIIKLPKYSLFELENGRKRMLAS
AGELQKGNELALPSKYVNFLYLASHYEKLKGSPEDNEQKQLFVEQHKHYLDEIIEQISEFSKRV
ILADANLDKVLSAYNKHRDKPIREQAENIIHLFTLTNLGAPAAFKYFDTTIDRKRYTSTKEVLD
ATLIHQSITGLYETRIDLSQLGGD

[0221] The Cas9 nuclease has two functional endonuclease domains: RuvC and HNH. Cas9 undergoes a conformational change upon target binding that positions the nuclease domains to cleave opposite strands of the target DNA. The end result of Cas9-mediated DNA cleavage is a double-strand break (DSB) within the target DNA (˜3-4 nucleotides upstream of the PAM sequence). The resulting DSB is then repaired by one of two general repair pathways: (1) the efficient but error-prone non-homologous end joining (NHEJ) pathway; or (2) the less efficient but high-fidelity homology directed repair (HDR) pathway.

[0222] The “efficiency” of non-homologous end joining (NHEJ) and/or homology directed repair (HDR) can be calculated by any convenient method. For example, in some embodiments, efficiency can be expressed in terms of percentage of successful HDR. For example, a surveyor nuclease assay can be used to generate cleavage products and the ratio of products to substrate can be used to calculate the percentage. For example, a surveyor nuclease enzyme can be used that directly cleaves DNA containing a newly integrated restriction sequence as the result of successful HDR. More cleaved substrate indicates a greater percent HDR (a greater efficiency of HDR). As an illustrative example, a fraction (percentage) of HDR can be calculated using the following equation [(cleavage products)/(substrate plus cleavage products)] (e.g., (b+c)/(a+b+c), where “a” is the band intensity of DNA substrate and “b” and “c” are the cleavage products).

[0223] In some embodiments, efficiency can be expressed in terms of percentage of successful NHEJ. For example, a T7 endonuclease I assay can be used to generate cleavage products and the ratio of products to substrate can be used to calculate the percentage NHEJ. T7 endonuclease I cleaves mismatched heteroduplex DNA which arises from hybridization of wild-type and mutant DNA strands (NHEJ generates small random insertions or deletions (indels) at the site of the original break). More cleavage indicates a greater percent NHEJ (a greater efficiency of NHEJ). As an illustrative example, a fraction (percentage) of NHEJ can be calculated using the following equation: (1−(1−(b+c)/(a+b+c))^{1/2})×100, where “a” is the band intensity of DNA substrate and “b” and “c” are the cleavage products (Ran et. al., Cell. 2013 Sep. 12; 154(6):1380-9; and Ran et al., Nat Protoc. 2013 November; 8(11): 2281-2308).

[0224] The NHEJ repair pathway is the most active repair mechanism, and it frequently causes small nucleotide insertions or deletions (indels) at the DSB site. The randomness of NHEJ-mediated DSB repair has important practical implications because a population of cells expressing Cas9 and a gRNA or a guide polynucleotide can result in a diverse array of mutations. In most embodiments, NHEJ gives rise to small indels in the target DNA that result in amino acid deletions, insertions, or frameshift mutations leading to premature stop codons within the open reading frame (ORF) of the targeted gene. The ideal end result is a loss-of-function mutation within the targeted gene.

[0225] While NHEJ-mediated DSB repair often disrupts the open reading frame of the gene, homology directed repair (HDR) can be used to generate specific nucleotide changes ranging from a single nucleotide change to large insertions like the addition of a fluorophore or tag.

[0226] In order to utilize HDR for gene editing, a DNA repair template containing the desired sequence can be delivered into the cell type of interest with the gRNA(s) and Cas9 or Cas9 nickase. The repair template can contain the desired edit as well as additional homologous sequence immediately upstream and downstream of the target (termed left & right homology arms). The length of each homology arm can be dependent on the size of the change being introduced, with larger insertions requiring longer homology arms. The repair template can be a single-stranded oligonucleotide, double-stranded oligonucleotide, or a double-stranded DNA plasmid. The efficiency of HDR is generally low (<10% of modified alleles) even in cells that express Cas9, gRNA and an exogenous repair template. The efficiency of HDR can be enhanced by synchronizing the cells, since HDR takes place during the S and G2 phases of the cell cycle. Chemically or genetically inhibiting genes involved in NHEJ can also increase HDR frequency.

[0227] In some embodiments, Cas9 is a modified Cas9. A given gRNA targeting sequence can have additional sites throughout the genome where partial homology exists. These sites are called off-targets and need to be considered when designing a gRNA. In addition to optimizing gRNA design, CRISPR specificity can also be increased through modifications to Cas9. Cas9 generates double-strand breaks (DSBs) through the combined activity of two nuclease domains, RuvC and HNH. Cas9 nickase, a D10A mutant of SpCas9, retains one nuclease domain and generates a DNA nick rather than a DSB. The nickase system can also be combined with HDR-mediated gene editing for specific gene edits.

### Catalytically Dead Nucleases

[0228] Also provided herein are base editors comprising a polynucleotide programmable nucleotide binding domain which is catalytically dead (i.e., incapable of cleaving a target polynucleotide sequence). Herein the terms “catalytically dead” and “nuclease dead” are used interchangeably to refer to a polynucleotide programmable nucleotide binding domain which has one or more mutations and/or deletions resulting in its inability to cleave a strand of a nucleic acid. In some embodiments, a catalytically dead polynucleotide programmable nucleotide binding domain base editor can lack nuclease activity as a result of specific point mutations in one or more nuclease domains. For example, in the case of a base editor comprising a Cas9 domain, the Cas9 can comprise both a D10A mutation and an H840A mutation. Such mutations inactivate both nuclease domains, thereby resulting in the loss of nuclease activity. In other embodiments, a catalytically dead polynucleotide programmable nucleotide binding domain comprises one or more deletions of all or a portion (e.g., a functional portion) of a catalytic domain (e.g., RuvC1 and/or HNH domains). In further embodiments, a catalytically dead polynucleotide programmable nucleotide binding domain comprises a point mutation (e.g., D10A or H840A) as well as a deletion of all or a portion (e.g., a functional portion) of a nuclease domain, dCas9 domains are known in the art and described, for example, in Qi et al., “Repurposing CRISPR as an RNA-guided platform for sequence-specific control of gene expression.” Cell. 2013; 152(5):1173-83, the entire contents of which are incorporated herein by reference.

[0229] Additional suitable nuclease-inactive dCas9 domains will be apparent to those of skill in the art based on this disclosure and knowledge in the field and are within the scope of this disclosure. Such additional exemplary suitable nuclease-inactive Cas9 domains include, but are not limited to, D10A/H840A, D10A/D839A/H840A, and D10A/D839A/H840A/N863A mutant domains (See, e.g., Prashant et al., CAS9 transcriptional activators for target specificity screening and paired nickases for cooperative genome engineering. Nature Biotechnology. 2013; 31(9): 833-838, the entire contents of which are incorporated herein by reference).

[0230] In some embodiments, dCas9 corresponds to, or comprises in part or in whole, a Cas9 amino acid sequence having one or more mutations that inactivate the Cas9 nuclease activity. In some embodiments, the nuclease-inactive dCas9 domain comprises a D10X mutation and a H840X mutation of the amino acid sequence set forth herein, or a corresponding mutation in any of the amino acid sequences provided herein, wherein X is any amino acid change. In some embodiments, the nuclease-inactive dCas9 domain comprises a D10A mutation and a H840A mutation of the amino acid sequence set forth herein, or a corresponding mutation in any of the amino acid sequences provided herein. In some embodiments, a nuclease-inactive Cas9 domain comprises the amino acid sequence set forth in Cloning vector pPlatTET-gRNA2 (Accession No. BAV54124).

[0231] In some embodiments, a variant Cas9 protein can cleave the complementary strand of a guide target sequence but has reduced ability to cleave the non-complementary strand of a double stranded guide target sequence. For example, the variant Cas9 protein can have a mutation (amino acid substitution) that reduces the function of the RuvC domain. As a non-limiting example, in some embodiments, a variant Cas9 protein has a D10A (aspartate to alanine at amino acid position 10) and can therefore cleave the complementary strand of a double stranded guide target sequence but has reduced ability to cleave the non-complementary strand of a double stranded guide target sequence (thus resulting in a single strand break (SSB) instead of a double strand break (DSB) when the variant Cas9 protein cleaves a double stranded target nucleic acid) (see, for example, Jinek et al., Science. 2012 Aug. 17; 337(6096):816-21).

[0232] In some embodiments, a variant Cas9 protein can cleave the non-complementary strand of a double stranded guide target sequence but has reduced ability to cleave the complementary strand of the guide target sequence. For example, the variant Cas9 protein can have a mutation (amino acid substitution) that reduces the function of the HNH domain (RuvC/HNH/RuvC domain motifs). As a non-limiting example, in some embodiments, the variant Cas9 protein has an H840A (histidine to alanine at amino acid position 840) mutation and can therefore cleave the non-complementary strand of the guide target sequence but has reduced ability to cleave the complementary strand of the guide target sequence (thus resulting in a SSB instead of a DSB when the variant Cas9 protein cleaves a double stranded guide target sequence). Such a Cas9 protein has a reduced ability to cleave a guide target sequence (e.g., a single stranded guide target sequence) but retains the ability to bind a guide target sequence (e.g., a single stranded guide target sequence).

[0233] As another non-limiting example, in some embodiments, the variant Cas9 protein harbors W476A and W1126A mutations such that the polypeptide has a reduced ability to cleave a target DNA. Such a Cas9 protein has a reduced ability to cleave a target DNA (e.g., a single stranded target DNA) but retains the ability to bind a target DNA (e.g., a single stranded target DNA).

[0234] As another non-limiting example, in some embodiments, the variant Cas9 protein harbors P475A, W476A, N477A, D1125A, WI 126A, and D1127A mutations such that the polypeptide has a reduced ability to cleave a target DNA. Such a Cas9 protein has a reduced ability to cleave a target DNA (e.g., a single stranded target DNA) but retains the ability to bind a target DNA (e.g., a single stranded target DNA).

[0235] As another non-limiting example, in some embodiments, the variant Cas9 protein harbors H840A, W476A, and W1126A, mutations such that the polypeptide has a reduced ability to cleave a target DNA. Such a Cas9 protein has a reduced ability to cleave a target DNA (e.g., a single stranded target DNA) but retains the ability to bind a target DNA (e.g., a single stranded target DNA). As another non-limiting example, in some embodiments, the variant Cas9 protein harbors H840A, D10A, W476A, and W1126A, mutations such that the polypeptide has a reduced ability to cleave a target DNA. Such a Cas9 protein has a reduced ability to cleave a target DNA (e.g., a single stranded target DNA) but retains the ability to bind a target DNA (e.g., a single stranded target DNA). In some embodiments, the variant Cas9 has restored catalytic His residue at position 840 in the Cas9 HNH domain (A840H).

[0236] As another non-limiting example, in some embodiments, the variant Cas9 protein harbors, H840A, P475A, W476A, N477A, D1125A, WI 126A, and D1127A mutations such that the polypeptide has a reduced ability to cleave a target DNA. Such a Cas9 protein has a reduced ability to cleave a target DNA (e.g., a single stranded target DNA) but retains the ability to bind a target DNA (e.g., a single stranded target DNA). As another non-limiting example, in some embodiments, the variant Cas9 protein harbors D10A, H840A, P475A, W476A, N477A, D1125A, W1126A, and D1127A mutations such that the polypeptide has a reduced ability to cleave a target DNA. Such a Cas9 protein has a reduced ability to cleave a target DNA (e.g., a single stranded target DNA) but retains the ability to bind a target DNA (e.g., a single stranded target DNA). In some embodiments, when a variant Cas9 protein harbors W476A and WI 126A mutations or when the variant Cas9 protein harbors P475A, W476A, N477A, D1125A, WI 126A, and D1127A mutations, the variant Cas9 protein does not bind efficiently to a PAM sequence. Thus, in some such embodiments, when such a variant Cas9 protein is used in a method of binding, the method does not require a PAM sequence. In other words, in some embodiments, when such a variant Cas9 protein is used in a method of binding, the method can include a guide RNA, but the method can be performed in the absence of a PAM sequence (and the specificity of binding is therefore provided by the targeting segment of the guide RNA). Other residues can be mutated to achieve the above effects (i.e., inactivate one or the other nuclease portions). As non-limiting examples, residues D10, G12, G17, E762, H840, N854, N863, H982, H983, A984, D986, and/or A987 can be altered (i.e., substituted). Also, mutations other than alanine substitutions are suitable.

[0237] In some embodiments, a variant Cas9 protein that has reduced catalytic activity (e.g., when a Cas9 protein has a D10, G12, G17, E762, H840, N854, N863, H982, H983, A984, D986, and/or a A987 mutation, e.g., D10A, G12A, G17A, E762A, H840A, N854A, N863A, H982A, H983A, A984A, and/or D986A), the variant Cas9 protein can still bind to target DNA in a site-specific manner (because it is still guided to a target DNA sequence by a guide RNA) as long as it retains the ability to interact with the guide RNA.

[0238] In some embodiments, the variant Cas protein can be spCas9, spCas9-VRQR, spCas9-VRER, xCas9 (sp), saCas9, saCas9-KKH, spCas9-MQKSER, spCas9-LRKIQK, or spCas9-LRVSQL.

[0239] In some embodiments, the Cas9 domain is a Cas9 domain from Staphylococcus aureus (SaCas9). In some embodiments, the SaCas9 domain is a nuclease active SaCas9, a nuclease inactive SaCas9 (SaCas9d), or a SaCas9 nickase (SaCas9n). In some embodiments, the SaCas9 comprises a N579A mutation, or a corresponding mutation in any of the amino acid sequences provided in the Sequence Listing submitted herewith.

[0240] In some embodiments, the SaCas9 domain, the SaCas9d domain, or the SaCas9n domain can bind to a nucleic acid sequence having a non-canonical PAM. In some embodiments, the SaCas9 domain, the SaCas9d domain, or the SaCas9n domain can bind to a nucleic acid sequence having a NNGRRT or a NNGRRV PAM sequence. In some embodiments, the SaCas9 domain comprises one or more of a E781X, a N967X, and a R1014X mutation, or a corresponding mutation in any of the amino acid sequences provided herein, wherein X is any amino acid. In some embodiments, the SaCas9 domain comprises one or more of a E781K, a N967K, and a R1014H mutation, or one or more corresponding mutation in any of the amino acid sequences provided herein. In some embodiments, the SaCas9 domain comprises a E781K, a N967K, or a R1014H mutation, or corresponding mutations in any of the amino acid sequences provided herein.

[0241] In some embodiments, one of the Cas9 domains present in the fusion protein or complexes may be replaced with a guide nucleotide sequence-programmable DNA-binding protein domain that has no requirements for a PAM sequence. In some embodiments, the Cas9 is an SaCas9. Residue A579 of SaCas9 can be mutated from N579 to yield a SaCas9 nickase. Residues K781, K967, and H1014 can be mutated from E781, N967, and R1014 to yield a SaKKH Cas9.

[0242] In some embodiments, a modified SpCas9 including amino acid substitutions D1135M, S1136Q, G1218K, E1219F, A1322R, D1332A, R1335E, and T1337R (SpCas9-MQKFRAER) and having specificity for the altered PAM 5′-NGC-3′ was used.

[0243] Alternatives to S. pyogenes Cas9 can include RNA-guided endonucleases from the Cpf1 family that display cleavage activity in mammalian cells. CRISPR from Prevotella and Francisella 1 (CRISPR/Cpf1) is a DNA-editing technology analogous to the CRISPR/Cas9 system. Cpf1 is an RNA-guided endonuclease of a class II CRISPR/Cas system. This acquired immune mechanism is found in Prevotella and Francisella bacteria. Cpf1 genes are associated with the CRISPR locus, coding for an endonuclease that use a guide RNA to find and cleave viral DNA. Cpf1 is a smaller and simpler endonuclease than Cas9, overcoming some of the CRISPR/Cas9 system limitations. Unlike Cas9 nucleases, the result of Cpf1-mediated DNA cleavage is a double-strand break with a short 3′ overhang. Cpf1's staggered cleavage pattern can open up the possibility of directional gene transfer, analogous to traditional restriction enzyme cloning, which can increase the efficiency of gene editing. Like the Cas9 variants and orthologues described above, Cpf1 can also expand the number of sites that can be targeted by CRISPR to AT-rich regions or AT-rich genomes that lack the NGG PAM sites favored by SpCas9. The Cpf1 locus contains a mixed alpha/beta domain, a RuvC-I followed by a helical region, a RuvC-II and a zinc finger-like domain. The Cpf1 protein has a RuvC-like endonuclease domain that is similar to the RuvC domain of Cas9.

[0244] Furthermore, Cpf1, unlike Cas9, does not have a HNH endonuclease domain, and the N-terminal of Cpf1 does not have the alpha-helical recognition lobe of Cas9. Cpf1 CRISPR-Cas domain architecture shows that Cpf1 is functionally unique, being classified as Class 2, type V CRISPR system. The Cpf1 loci encode Cas1, Cas2 and Cas4 proteins that are more similar to types I and III than type II systems. Functional Cpf1 does not require the trans-activating CRISPR RNA (tracrRNA), therefore, only CRISPR (crRNA) is required. This benefits genome editing because Cpf1 is not only smaller than Cas9, but also it has a smaller sgRNA molecule (approximately half as many nucleotides as Cas9). The Cpf1-crRNA complex cleaves target DNA or RNA by identification of a protospacer adjacent motif 5′-YTN-3′ or 5′-TTN-3′ in contrast to the G-rich PAM targeted by Cas9. After identification of PAM, Cpf1 introduces a sticky-end-like DNA double-stranded break having an overhang of 4 or 5 nucleotides.

[0245] In some embodiments, the Cas9 is a Cas9 variant having specificity for an altered PAM sequence. In some embodiments, the Additional Cas9 variants and PAM sequences are described in Miller, S. M., et al. Continuous evolution of SpCas9 variants compatible with non-G PAMs, Nat. Biotechnol. (2020), the entirety of which is incorporated herein by reference. in some embodiments, a Cas9 variate have no specific PAM requirements. In some embodiments, a Cas9 variant, e.g., a SpCas9 variant has specificity for a NRNH PAM, wherein R is A or G and H is A, C, or T. In some embodiments, the SpCas9 variant has specificity for a PAM sequence AAA, TAA, CAA, GAA, TAT, GAT, or CAC. In some embodiments, the SpCas9 variant comprises an amino acid substitution at position 1114, 1134, 1135, 1137, 1139, 1151, 1180, 1188, 1211, 1218, 1219, 1221, 1249, 1256, 1264, 1290, 1318, 1317, 1320, 1321, 1323, 1332, 1333, 1335, 1337, or 1339 or a corresponding position thereof. In some embodiments, the SpCas9 variant comprises an amino acid substitution at position 1114, 1135, 1218, 1219, 1221, 1249, 1320, 1321, 1323, 1332, 1333, 1335, or 1337 or a corresponding position thereof. In some embodiments, the SpCas9 variant comprises an amino acid substitution at position 1114, 1134, 1135, 1137, 1139, 1151, 1180, 1188, 1211, 1219, 1221, 1256, 1264, 1290, 1318, 1317, 1320, 1323, 1333 or a corresponding position thereof. In some embodiments, the SpCas9 variant comprises an amino acid substitution at position 1114, 1131, 1135, 1150, 1156, 1180, 1191, 1218, 1219, 1221, 1227, 1249, 1253, 1286, 1293, 1320, 1321, 1332, 1335, 1339 or a corresponding position thereof. In some embodiments, the SpCas9 variant comprises an amino acid substitution at position 1114, 1127, 1135, 1180, 1207, 1219, 1234, 1286, 1301, 1332, 1335, 1337, 1338, 1349 or a corresponding position thereof. Exemplary amino acid substitutions and PAM specificity of SpCas9 variants are shown in Tables 3A-3D).

TABLE 3A
SpCas9 Variants and PAM specificity

| | SpCas9 amino acid position | | | | | | | | | | | | |
|---|---|---|---|---|---|---|---|---|---|---|---|---|---|
| | 1114 | 1135 | 1218 | 1219 | 1221 | 1249 | 1320 | 1321 | 1323 | 1332 | 1333 | 1335 | 1337 |
| PAM | R | D | G | E | Q | P | A | P | A | D | R | R | T |
| AAA | | N | | V | H | | | | | | G | | |
| AAA | | N | | V | H | | | | | | G | | |
| AAA | | | | V | | | | | | | G | | |
| TAA | G | N | | V | | | | | | | I | | |
| TAA | | N | | V | | | | | | | I | | A |
| TAA | G | N | | V | | | | | | | I | | A |
| CAA | | | | V | | | | | | | K | | |
| CAA | | N | | V | | | | | | | K | | |
| CAA | | N | | V | | | | | | | K | | |
| GAA | | | | V | H | | V | | | | K | | |
| GAA | | N | | V | | | V | | | | K | | |
| GAA | | | | V | H | | V | | | | K | | |
| TAT | | | S | V | H | S | | S | | | | L | |
| TAT | | | S | V | H | S | | S | | | | L | |
| TAT | | | S | V | H | S | | S | | | | L | |
| GAT | | | | V | | | | | | | I | | |
| GAT | | | | V | | | | | D | | | Q | |
| GAT | | | | V | | | | | D | | | Q | |
| CAC | | | | V | | | | | | N | | Q | N |
| CAC | | N | | V | | | | | | | | Q | N |
| CAC | | | | V | | | | | | N | | Q | N |

TABLE 3B
SpCas9 Variants and PAM specificity

| | SpCas9 amino acid position | | | | | | | | | | | | | | | | | | |
|---|---|---|---|---|---|---|---|---|---|---|---|---|---|---|---|---|---|---|---|
| | 1114 | 1134 | 1135 | 1137 | 1139 | 1151 | 1180 | 1188 | 1211 | 1219 | 1221 | 1256 | 1264 | 1290 | 1318 | 1317 | 1320 | 1323 | 1333 |
| PAM | R | F | D | P | V | K | D | K | K | E | Q | Q | H | V | L | N | A | A | R |
| GAA | | | | | | | | | | V | H | | | | | | V | | K |
| GAA | | | N | S | | | | | | V | | | | | | | V | D | K |
| GAA | | | N | | | | | | | V | H | | Y | | | | V | | K |
| CAA | | | N | | | | | | | V | H | | Y | | | | V | | K |
| CAA | G | | N | S | | | | | | V | H | | Y | | | | V | | K |
| CAA | | | N | | | | | R | | V | H | | | | | | V | | K |
| CAA | | | N | | | | G | | R | V | H | | Y | | | | V | | K |
| CAA | | | N | | | | | | | V | H | | Y | | | | V | | K |
| AAA | | | N | | | | G | | | V | H | R | Y | | | | V | D | K |
| CAA | G | | N | | | | G | | | V | H | | Y | | | | V | D | K |
| CAA | | L | N | | | | G | | | V | H | | Y | | | T | V | D | K |
| TAA | G | | N | | | | G | | | V | H | | Y | G | S | | V | D | K |
| TAA | G | | N | | | E | G | | | V | H | | Y | | S | | V | | K |
| TAA | G | | N | | | | G | | | V | H | | Y | | S | | V | D | K |
| TAA | G | | N | | | | G | | R | V | H | | | | | | V | | K |
| TAA | | | N | | | | G | | R | V | H | | Y | | | | V | | K |
| TAA | G | | N | | A | | G | | | V | H | | | | | | V | | K |
| TAA | G | | N | | | | | | | V | H | | | | | | V | | K |

TABLE 3C
SpCas9 Variants and PAM specificity

| | SpCas9 amino acid position | | | | | | | | | | |
|---|---|---|---|---|---|---|---|---|---|---|---|
| | 1114 | 1131 | 1135 | 1150 | 1156 | 1180 | 1191 | 1218 | 1219 | 1221 | 1227 |
| PAM | R | Y | D | E | K | D | K | G | E | Q | A |
| SacB.TAT | | | N | | | | N | | V | H | |
| SacB.TAT | | | N | | | | | S | V | H | |
| AAT | | | N | | | | | S | V | H | V |
| TAT | G | | N | | | G | | S | V | H | |
| TAT | G | | N | | | G | | S | V | H | |
| TAT | G | C | N | | | G | | S | V | H | |
| TAT | G | C | N | | | G | | S | V | H | |
| TAT | G | C | N | | | G | | S | V | H | |
| TAT | G | C | N | | E | G | | S | V | H | |
| TAT | G | C | N | V | | G | | S | V | H | |
| TAT | | C | N | | | G | | S | V | H | |
| TAT | G | C | N | | | G | | S | V | H | |

| | SpCas9 amino acid position | | | | | | | | |
|---|---|---|---|---|---|---|---|---|---|
| | 1249 | 1253 | 1286 | 1293 | 1320 | 1321 | 1332 | 1335 | 1339 |
| PAM | P | E | N | A | A | P | D | R | T |
| SacB.TAT | | | | | V | S | | L | |
| SacB.TAT | S | | | | | S | G | L | |
| AAT | S | | K | T | | S | G | L | I |
| TAT | S | K | | | | S | G | L | |
| TAT | S | | | | | S | G | L | |
| TAT | S | | | | | S | G | L | |
| TAT | S | | | | | S | G | L | |
| TAT | S | | | | | S | G | L | |
| TAT | S | | | | | S | G | L | |
| TAT | S | | | | | S | G | L | |
| TAT | S | | | | | S | G | L | |
| TAT | S | | | | | S | G | L | |

TABLE 3D
SpCas9 Variants and PAM specificity

| | SpCas9 amino acid position | | | | | | | | | | | | | |
|---|---|---|---|---|---|---|---|---|---|---|---|---|---|---|
| | 1114 | 1127 | 1135 | 1180 | 1207 | 1219 | 1234 | 1286 | 1301 | 1332 | 1335 | 1337 | 1338 | 1349 |
| PAM | R | D | D | D | E | E | N | N | P | D | R | T | S | H |

| | | | | | | | | | | | | | |
|---|---|---|---|---|---|---|---|---|---|---|---|---|---|
| SacB.CAC | | | N | | | V | | | N | Q | N | | |
| AAC | G | | N | | | V | | | N | Q | N | | |
| AAC | G | | N | | | V | | | N | Q | N | | |
| TAC | G | | N | | | V | | | N | Q | N | | |
| TAC | G | | N | | | V | | H | N | Q | N | | |
| TAC | G | | N | | G | V | D | H | N | Q | N | | |
| TAC | G | | N | | | V | | | N | Q | N | | |
| TAC | G | G | N | E | | V | | H | N | Q | N | | |
| TAC | G | | N | | | V | | H | N | Q | N | | |
| TAC | G | | N | | | V | | | N | Q | N | T | R |

[0246] Further exemplary Cas9 (e.g., SaCas9) polypeptides with modified PAM recognition are described in Kleinstiver, et al. “Broadening the targeting range of Staphylococcus aureus CRISPR-Cas9 by modifying PAM recognition,” Nature Biotechnology, 33:1293-1298 (2015) DOI: 10.1038/nbt.3404, the disclosure of which is incorporated herein by reference in its entirety for all purposes. In some embodiments, a Cas9 variant (e.g., a SaCas9 variant) comprising one or more of the alterations E782K, N929R, N968K, and/or R1015H has specificity for, or is associated with increased editing activities relative to a reference polypeptide (e.g., SaCas9) at an NNNRRT or NNHRRT PAM sequence, where N represents any nucleotide, H represents any nucleotide other than G (i.e., “not G”), and R represents a purine. In embodiments, the Cas9 variant (e.g., a SaCas9 variant) comprises the alterations E782K, N968K, and R1015H or the alterations E782K, K929R, and R1015H.

[0247] In some embodiments, the nucleic acid programmable DNA binding protein (napDNAbp) is a single effector of a microbial CRISPR-Cas system. Single effectors of microbial CRISPR-Cas systems include, without limitation, Cas9, Cpf1, Cas12b/C2c1, and Cas12c/C2c3. Typically, microbial CRISPR-Cas systems are divided into Class 1 and Class 2 systems. Class 1 systems have multisubunit effector complexes, while Class 2 systems have a single protein effector. For example, Cas9 and Cpf1 are Class 2 effectors. In addition to Cas9 and Cpf1, three distinct Class 2 CRISPR-Cas systems (Cas12b/C2c1, and Cas12c/C2c3) have been described by Shmakov et al., “Discovery and Functional Characterization of Diverse Class 2 CRISPR Cas Systems”, Mol. Cell, 2015 Nov. 5; 60(3): 385-397, the entire contents of which is hereby incorporated by reference. Effectors of two of the systems, Cas12b/C2c1, and Cas12c/C2c3, contain RuvC-like endonuclease domains related to Cpf1. A third system contains an effector with two predicated HEPN RNase domains. Production of mature CRISPR RNA is tracrRNA-independent, unlike production of CRISPR RNA by Cas12b/C2c1. Cas12b/C2c1 depends on both CRISPR RNA and tracrRNA for DNA cleavage.

[0248] In some embodiments, the napDNAbp is a circular permutant (e.g., SEQ ID NO: 238).

[0249] The crystal structure of Alicyclobaccillus acidoterrastris Cas12b/C2c1 (AacC2c1) has been reported in complex with a chimeric single-molecule guide RNA (sgRNA). See e.g., Liu et al., “C2c1-sgRNA Complex Structure Reveals RNA-Guided DNA Cleavage Mechanism”, Mol. Cell, 2017 Jan. 19; 65(2):310-322, the entire contents of which are hereby incorporated by reference. The crystal structure has also been reported in Alicyclobacillus acidoterrestris C2c1 bound to target DNAs as ternary complexes. See e.g., Yang et al., “PAM-dependent Target DNA Recognition and Cleavage by C2C1 CRISPR-Cas endonuclease”, Cell, 2016 Dec. 15; 167(7):1814-1828, the entire contents of which are hereby incorporated by reference. Catalytically competent conformations of AacC2c1, both with target and non-target DNA strands, have been captured independently positioned within a single RuvC catalytic pocket, with Cas12b/C2c1-mediated cleavage resulting in a staggered seven-nucleotide break of target DNA. Structural comparisons between Cas12b/C2c1 ternary complexes and previously identified Cas9 and Cpf1 counterparts demonstrate the diversity of mechanisms used by CRISPR-Cas9 systems.

[0250] In some embodiments, the nucleic acid programmable DNA binding protein (napDNAbp) of any of the fusion proteins or complexes provided herein may be a Cas12b/C2c1, or a Cas12c/C2c3 protein. In some embodiments, the napDNAbp is a Cas12b/C2c1 protein. In some embodiments, the napDNAbp is a Cas12c/C2c3 protein. In some embodiments, the napDNAbp comprises an amino acid sequence that is at least 85%, at least 90%, at least 91%, at least 92%, at least 93%, at least 94%, at least 95%, at least 96%, at least 97%, at least 98%, at least 99%, or at ease 99.5% identical to a naturally-occurring Cas12b/C2c1 or Cas12c/C2c3 protein. In some embodiments, the napDNAbp is a naturally-occurring Cas12b/C2c1 or Cas12c/C2c3 protein. In some embodiments, the napDNAbp comprises an amino acid sequence that is at least 85%, at least 90%, at least 91%, at least 92%, at least 93%, at least 94%, at least 95%, at least 96%, at least 97%, at least 98%, at least 99%, or at ease 99.5% identical to any one of the napDNAbp sequences provided herein. It should be appreciated that Cas12b/C2c1 or Cas12c/C2c3 from other bacterial species may also be used in accordance with the present disclosure.

[0251] In some embodiments, anapDNAbp refers to Cas12c. In some embodiments, the Cas12c protein is a Cas12c1 (SEQ ID NO: 239) or a variant of Cas12c1. In some embodiments, the Cas12 protein is a Cas12c2 (SEQ ID NO: 240) or a variant of Cas12c2. In some embodiments, the Cas12 protein is a Cas12c protein from Oleiphilus sp. H10009 (i.e., OspCas12c; SEQ ID NO: 241) or a variant of OspCas12c. These Cas12c molecules have been described in Yan et al., “Functionally Diverse Type V CRISPR-Cas Systems,” Science, 2019 Jan. 4; 363: 88-91; the entire contents of which is hereby incorporated by reference. In some embodiments, the napDNAbp comprises an amino acid sequence that is at least 85%, at least 90%, at least 91%, at least 92%, at least 93%, at least 94%, at least 95%, at least 96%, at least 97%, at least 98%, at least 99%, or at least 99.5% identical to a naturally-occurring Cas12c1, Cas12c2, or OspCas12c protein. In some embodiments, the napDNAbp is a naturally-occurring Cas12c1, Cas12c2, or OspCas12c protein. In some embodiments, the napDNAbp comprises an amino acid sequence that is at least 85%, at least 90%, at least 91%, at least 92%, at least 93%, at least 94%, at least 95%, at least 96%, at least 97%, at least 98%, at least 99%, or at ease 99.5% identical to any Cas12c1, Cas12c2, or OspCas12c protein described herein. It should be appreciated that Cas12c1, Cas12c2, or OspCas12c from other bacterial species may also be used in accordance with the present disclosure.

[0252] In some embodiments, a napDNAbp refers to Cas12g, Cas12h, or Cas12i, which have been described in, for example, Yan et al., “Functionally Diverse Type V CRISPR-Cas Systems,” Science, 2019 Jan. 4; 363: 88-91; the entire contents of each is hereby incorporated by reference. Exemplary Cas12g, Cas12h, and Cas12i polypeptide sequences are provided in the Sequence Listing as SEQ ID NOs: 242-245. By aggregating more than 10 terabytes of sequence data, new classifications of Type V Cas proteins were identified that showed weak similarity to previously characterized Class V protein, including Cas12g, Cas12h, and Cas12i. In some embodiments, the Cas12 protein is a Cas12g or a variant of Cas12g. In some embodiments, the Cas12 protein is a Cas12h or a variant of Cas12h. In some embodiments, the Cas12 protein is a Cas12i or a variant of Cas12i. It should be appreciated that other RNA-guided DNA binding proteins may be used as a napDNAbp and are within the scope of this disclosure. In some embodiments, the napDNAbp comprises an amino acid sequence that is at least 85%, at least 90%, at least 91%, at least 92%, at least 93%, at least 94%, at least 95%, at least 96%, at least 97%, at least 98%, at least 99%, or at least 99.5% identical to a naturally-occurring Cas12g, Cas12h, or Cas12i protein. In some embodiments, the napDNAbp is a naturally-occurring Cas12g, Cas12h, or Cas12i protein. In some embodiments, the napDNAbp comprises an amino acid sequence that is at least 85%, at least 90%, at least 91%, at least 92%, at least 93%, at least 94%, at least 95%, at least 96%, at least 97%, at least 98%, at least 99%, or at ease 99.5% identical to any Cas12g, Cas12h, or Cas12i protein described herein. It should be appreciated that Cas12g, Cas12h, or Cas12i from other bacterial species may also be used in accordance with the present disclosure. In some embodiments, the Cas12i is a Cas12i1 or a Cas12i2.

[0253] In some embodiments, the nucleic acid programmable DNA binding protein (napDNAbp) of any of the fusion proteins or complexes provided herein may be a Cas12j/CasΦ protein. Cas12j/CasΦ is described in Pausch et al., “CRISPR-CasΦ from huge phages is a hypercompact genome editor,” Science, 17 Jul. 2020, Vol. 369, Issue 6501, pp. 333-337, which is incorporated herein by reference in its entirety. In some embodiments, the napDNAbp comprises an amino acid sequence that is at least 85%, at least 90%, at least 91%, at least 92%, at least 93%, at least 94%, at least 95%, at least 96%, at least 97%, at least 98%, at least 99%, or at ease 99.5% identical to a naturally-occurring Cas12j/CasΦ protein. In some embodiments, the napDNAbp is a naturally-occurring Cas12j/CasΦ protein. In some embodiments, the napDNAbp is a nuclease inactive (“dead”) Cas12j/CasΦ protein. It should be appreciated that Cas12j/CasΦ from other species may also be used in accordance with the present disclosure.

Fusion Proteins or Complexes with Internal Insertions

[0254] Provided herein are fusion proteins or complexes comprising a heterologous polypeptide fused to a nucleic acid programmable nucleic acid binding protein, for example, a napDNAbp. A heterologous polypeptide can be a polypeptide that is not found in the native or wild-type napDNAbp polypeptide sequence. The heterologous polypeptide can be fused to the napDNAbp at a C-terminal end of the napDNAbp, an N-terminal end of the napDNAbp, or inserted at an internal location of the napDNAbp. In some embodiments, the heterologous polypeptide is a deaminase (e.g., cytidine or adenosine deaminase) or a functional fragment thereof. For example, a fusion protein can comprise a deaminase flanked by an N-terminal fragment and a C-terminal fragment of a Cas9 or Cas12 (e.g., Cas12b/C2c1), polypeptide. In some embodiments, the cytidine deaminase is an APOBEC deaminase (e.g., APOBEC1). In some embodiments, the adenosine deaminase is a TadA (e.g., TadA*7.10 or TadA*8). In some embodiments, the TadA is a TadA*8 or a TadA*9. TadA sequences (e.g., TadA7.10 or TadA*8) as described herein are suitable deaminases for the above-described fusion proteins or complexes.

[0255] In some embodiments, the fusion protein comprises the structure:
[0256] NH₂-[N-terminal fragment of a napDNAbp]-[deaminase]-[C-terminal fragment of a napDNAbp]-COOH;
[0257] NH₂-[N-terminal fragment of a Cas9]-[adenosine deaminase]-[C-terminal fragment of a Cas9]-COOH;
[0258] NH₂-[N-terminal fragment of a Cas12]-[adenosine deaminase]-[C-terminal fragment of a Cas12]-COOH;
[0259] NH₂-[N-terminal fragment of a Cas9]-[cytidine deaminase]-[C-terminal fragment of a Cas9]-COOH;
[0260] NH₂-[N-terminal fragment of a Cas12]-[cytidine deaminase]-[C-terminal fragment of a Cas12]-COOH;
[0261] wherein each instance of “]−[” indicates the optional presence of a linker (i.e., the linker is optionally present).

[0262] The deaminase can be a circular permutant deaminase. For example, the deaminase can be a circular permutant adenosine deaminase. In some embodiments, the deaminase is a circular permutant TadA, circularly permutated at amino acid residue 116, 136, or 65 as numbered in a TadA reference sequence.

[0263] The fusion protein or complexes can comprise more than one deaminase. The fusion protein or complex can comprise, for example, 1, 2, 3, 4, 5 or more deaminases. In some embodiments, the fusion protein or complex comprises one or two deaminase. The two or more deaminases in a fusion protein or complex can be an adenosine deaminase, a cytidine deaminase, or a combination thereof. The two or more deaminases can be homodimers or heterodimers. The two or more deaminases can be inserted in tandem in the napDNAbp. In some embodiments, the two or more deaminases may not be in tandem in the napDNAbp.

[0264] In some embodiments, the napDNAbp in the fusion protein or complex is a Cas9 polypeptide or a fragment (e.g., a functional fragment) thereof. The Cas9 polypeptide can be a variant Cas9 polypeptide. In some embodiments, the Cas9 polypeptide is a Cas9 nickase (nCas9) polypeptide or a fragment (e.g., a functional fragment) thereof. In some embodiments, the Cas9 polypeptide is a nuclease dead Cas9 (dCas9) polypeptide or a fragment (e.g., a functional fragment) thereof. The Cas9 polypeptide in a fusion protein or complex can be a full-length Cas9 polypeptide. In some cases, the Cas9 polypeptide in a fusion protein or complex may not be a full length Cas9 polypeptide. The Cas9 polypeptide can be truncated, for example, at a N-terminal or C-terminal end relative to a naturally-occurring Cas9 protein. The Cas9 polypeptide can be a circularly permuted Cas9 protein. The Cas9 polypeptide can be a fragment (e.g., a functional fragment), a portion (e.g., a functional portion), or a domain of a Cas9 polypeptide, that is still capable of binding the target polynucleotide and a guide nucleic acid sequence.

[0265] In some embodiments, the Cas9 polypeptide is a Streptococcus pyogenes Cas9 (SpCas9), Staphylococcus aureus Cas9 (SaCas9), Streptococcus thermophilus 1 Cas9 (St1Cas9), or fragments (e.g., functional fragments) or variants of any of the Cas9 polypeptides described herein.

[0266] In some embodiments, the fusion protein comprises an adenosine deaminase domain and a cytidine deaminase domain inserted within a Cas9. In some embodiments, an adenosine deaminase is fused within a Cas9 and a cytidine deaminase is fused to the C-terminus. In some embodiments, an adenosine deaminase is fused within Cas9 and a cytidine deaminase fused to the N-terminus. In some embodiments, a cytidine deaminase is fused within Cas9 and an adenosine deaminase is fused to the C-terminus. In some embodiments, a cytidine deaminase is fused within Cas9 and an adenosine deaminase fused to the N-terminus.

[0267] Exemplary structures of a fusion protein with an adenosine deaminase and a cytidine deaminase and a Cas9 are provided as follows:
[0268] NH₂-[Cas9(adenosine deaminase)]-[cytidine deaminase]-COOH;
[0269] NH₂-[cytidine deaminase]-[Cas9(adenosine deaminase)]-COOH;
[0270] NH₂-[Cas9(cytidine deaminase)]-[adenosine deaminase]-COOH; or
[0271] NH₂-[adenosine deaminase]-[Cas9(cytidine deaminase)]-COOH.

[0272] In some embodiments, the “−” used in the general architecture above indicates the optional presence of linker.

[0273] In various embodiments, the catalytic domain has DNA modifying activity (e.g., deaminase activity), such as adenosine deaminase activity. In some embodiments, the adenosine deaminase is a TadA (e.g., TadA*7.10). In some embodiments, the TadA is a TadA*8. In some embodiments, a TadA*8 is fused within Cas9 and a cytidine deaminase is fused to the C-terminus. In some embodiments, a TadA*8 is fused within Cas9 and a cytidine deaminase fused to the N-terminus. In some embodiments, a cytidine deaminase is fused within Cas9 and a TadA*8 is fused to the C-terminus. In some embodiments, a cytidine deaminase is fused within Cas9 and a TadA*8 fused to the N-terminus. Exemplary structures of a fusion protein with a TadA*8 and a cytidine deaminase and a Cas9 are provided as follows:
[0274] NH₂-[Cas9(TadA*8)]-[cytidine deaminase]-COOH;
[0275] NH₂-[cytidine deaminase]-[Cas9(TadA*8)]-COOH;
[0276] NH₂-[Cas9(cytidine deaminase)]-[TadA*8]-COOH; or
[0277] NH₂-[TadA*8]-[Cas9(cytidine deaminase)]-COOH.

[0278] In some embodiments, the “−” used in the general architecture above indicates the optional presence of a linker.

[0279] The heterologous polypeptide (e.g., deaminase) can be inserted in the napDNAbp (e.g., Cas9 or Cas12 (e.g., Cas12b/C2c1)) at a suitable location, for example, such that the napDNAbp retains its ability to bind the target polynucleotide and a guide nucleic acid. A deaminase (e.g. adenosine deaminase, cytidine deaminase, or adenosine deaminase and cytidine deaminase (dual deaminase)) can be inserted into a napDNAbp without compromising function of the deaminase (e.g., base editing activity) or the napDNAbp (e.g., ability to bind to target nucleic acid and guide nucleic acid). A deaminase (e.g., adenosine deaminase, cytidine deaminase, or adenosine deaminase and cytidine deaminase) can be inserted in the napDNAbp at, for example, a disordered region or a region comprising a high temperature factor or B-factor as shown by crystallographic studies. Regions of a protein that are less ordered, disordered, or unstructured, for example solvent exposed regions and loops, can be used for insertion without compromising structure or function. A deaminase (e.g., adenosine deaminase, cytidine deaminase, or adenosine deaminase and cytidine deaminase)can be inserted in the napDNAbp in a flexible loop region or a solvent-exposed region. In some embodiments, the deaminase (e.g., adenosine deaminase, cytidine deaminase, or adenosine deaminase and cytidine deaminase) is inserted in a flexible loop of the Cas9 or the Cas12b/C2c1 polypeptide.

[0280] In some embodiments, the insertion location of a deaminase (e.g., adenosine deaminase, cytidine deaminase, or adenosine deaminase and cytidine deaminase) is determined by B-factor analysis of the crystal structure of Cas9 polypeptide. In some embodiments, the deaminase (e.g., adenosine deaminase, cytidine deaminase, or adenosine deaminase and cytidine deaminase) is inserted in regions of the Cas9 polypeptide comprising higher than average B-factors (e.g., higher B factors compared to the total protein or the protein domain comprising the disordered region). B-factor or temperature factor can indicate the fluctuation of atoms from their average position (for example, as a result of temperature-dependent atomic vibrations or static disorder in a crystal lattice). A high B-factor (e.g., higher than average B-factor) for backbone atoms can be indicative of a region with relatively high local mobility. Such a region can be used for inserting a deaminase without compromising structure or function. A deaminase (e.g., adenosine deaminase, cytidine deaminase, or adenosine deaminase and cytidine deaminase) can be inserted at a location with a residue having a Cu atom with a B-factor that is 50%, 60%, 70%, 80%, 90%, 100%, 110%, 120%, 130%, 140%, 150%, 160%, 170%, 180%, 190%, 200%, or greater than 200% more than the average B-factor for the total protein. A deaminase (e.g., adenosine deaminase, cytidine deaminase, or adenosine deaminase and cytidine deaminase) can be inserted at a location with a residue having a Cu atom with a B-factor that is 50%, 60%, 70%, 80%, 90%, 100%, 110%, 120%, 130%, 140%, 150%, 160%, 170%, 180%, 190%, 200% or greater than 200% more than the average B-factor for a Cas9 protein domain comprising the residue. Cas9 polypeptide positions comprising a higher than average B-factor can include, for example, residues 768, 792, 1052, 1015, 1022, 1026, 1027, 1029, 1030, 1067, 1040, 1054, 1068, 1246, 1247, and 1248 as numbered in the above Cas9 reference sequence. Cas9 polypeptide regions comprising a higher than average B-factor can include, for example, residues 792-872, 792-906, and 2-791 as numbered in the above Cas9 reference sequence.

[0281] A heterologous polypeptide (e.g., deaminase) can be inserted in the napDNAbp at an amino acid residue selected from the group consisting of: 768, 791, 792, 1015, 1016, 1022, 1023, 1026, 1027, 1029, 1030, 1040, 1052, 1054, 1067, 1068, 1069, 1246, 1247, and 1248 as numbered in the above Cas9 reference sequence, or a corresponding amino acid residue in another Cas9 polypeptide. In some embodiments, the heterologous polypeptide is inserted between amino acid positions 768-769, 791-792, 792-793, 1015-1016, 1022-1023, 1026-1027, 1029-1030, 1040-1041, 1052-1053, 1054-1055, 1067-1068, 1068-1069, 1247-1248, or 1248-1249 as numbered in the above Cas9 reference sequence or corresponding amino acid positions thereof. In some embodiments, the heterologous polypeptide is inserted between amino acid positions 769-770, 792-793, 793-794, 1016-1017, 1023-1024, 1027-1028, 1030-1031, 1041-1042, 1053-1054, 1055-1056, 1068-1069, 1069-1070, 1248-1249, or 1249-1250 as numbered in the above Cas9 reference sequence or corresponding amino acid positions thereof. In some embodiments, the heterologous polypeptide replaces an amino acid residue selected from the group consisting of: 768, 791, 792, 1015, 1016, 1022, 1023, 1026, 1027, 1029, 1030, 1040, 1052, 1054, 1067, 1068, 1069, 1246, 1247, and 1248 as numbered in the above Cas9 reference sequence, or a corresponding amino acid residue in another Cas9 polypeptide. It should be understood that the reference to the above Cas9 reference sequence with respect to insertion positions is for illustrative purposes. The insertions as discussed herein are not limited to the Cas9 polypeptide sequence of the above Cas9 reference sequence but include insertion at corresponding locations in variant Cas9 polypeptides, for example a Cas9 nickase (nCas9), nuclease dead Cas9 (dCas9), a Cas9 variant lacking a nuclease domain, a truncated Cas9, or a Cas9 domain lacking partial or complete HNH domain.

[0282] A heterologous polypeptide (e.g., deaminase) can be inserted in the napDNAbp at an amino acid residue selected from the group consisting of: 768, 792, 1022, 1026, 1040, 1068, and 1247 as numbered in the above Cas9 reference sequence, or a corresponding amino acid residue in another Cas9 polypeptide. In some embodiments, the heterologous polypeptide is inserted between amino acid positions 768-769, 792-793, 1022-1023, 1026-1027, 1029-1030, 1040-1041, 1068-1069, or 1247-1248 as numbered in the above Cas9 reference sequence or corresponding amino acid positions thereof. In some embodiments, the heterologous polypeptide is inserted between amino acid positions 769-770, 793-794, 1023-1024, 1027-1028, 1030-1031, 1041-1042, 1069-1070, or 1248-1249 as numbered in the above Cas9 reference sequence or corresponding amino acid positions thereof. In some embodiments, the heterologous polypeptide replaces an amino acid residue selected from the group consisting of: 768, 792, 1022, 1026, 1040, 1068, and 1247 as numbered in the above Cas9 reference sequence, or a corresponding amino acid residue in another Cas9 polypeptide.

[0283] A heterologous polypeptide (e.g., deaminase) can be inserted in the napDNAbp at an amino acid residue as described herein, or a corresponding amino acid residue in another Cas9 polypeptide. In an embodiment, a heterologous polypeptide (e.g., deaminase) can be inserted in the napDNAbp at an amino acid residue selected from the group consisting of: 1002, 1003, 1025, 1052-1056, 1242-1247, 1061-1077, 943-947, 686-691, 569-578, 530-539, and 1060-1077 as numbered in the above Cas9 reference sequence, or a corresponding amino acid residue in another Cas9 polypeptide. The deaminase (e.g., adenosine deaminase, cytidine deaminase, or adenosine deaminase and cytidine deaminase) can be inserted at the N-terminus or the C-terminus of the residue or replace the residue. In some embodiments, the deaminase (e.g., adenosine deaminase, cytidine deaminase, or adenosine deaminase and cytidine deaminase) is inserted at the C-terminus of the residue.

[0284] In some embodiments, an adenosine deaminase (e.g., TadA) is inserted at an amino acid residue selected from the group consisting of: 1015, 1022, 1029, 1040, 1068, 1247, 1054, 1026, 1027, 1030, 768, 1067, 1248, 1052, and 1246 as numbered in the above Cas9 reference sequence, or a corresponding amino acid residue in another Cas9 polypeptide. In some embodiments, an adenosine deaminase (e.g., TadA) is inserted in place of residues 792-872, 792-906, or 2-791 as numbered in the above Cas9 reference sequence, or a corresponding amino acid residue in another Cas9 polypeptide. In some embodiments, the adenosine deaminase is inserted at the N-terminus of an amino acid selected from the group consisting of: 1015, 1022, 1029, 1040, 1068, 1247, 1054, 1026, 1027, 1030, 768, 1067, 1248, 1052, and 1246 as numbered in the above Cas9 reference sequence, or a corresponding amino acid residue in another Cas9 polypeptide. In some embodiments, the adenosine deaminase is inserted at the C-terminus of an amino acid selected from the group consisting of: 1015, 1022, 1029, 1040, 1068, 1247, 1054, 1026, 1027, 1030, 768, 1067, 1248, 1052, and 1246 as numbered in the above Cas9 reference sequence, or a corresponding amino acid residue in another Cas9 polypeptide. In some embodiments, the adenosine deaminase is inserted to replace an amino acid selected from the group consisting of: 1015, 1022, 1029, 1040, 1068, 1247, 1054, 1026, 1027 1030, 768, 1067, 1248, 1052, and 1246 as numbered in the above Cas9 reference sequence, or a corresponding amino acid residue in another Cas9 polypeptide.

[0285] In some embodiments, a cytidine deaminase (e.g., APOBEC) is inserted at an amino acid residue selected from the group consisting of: 1016, 1023, 1029, 1040, 1069, and 1247 as numbered in the above Cas9 reference sequence, or a corresponding amino acid residue in another Cas9 polypeptide. In some embodiments, the cytidine deaminase is inserted at the N-terminus of an amino acid selected from the group consisting of: 1016, 1023, 1029, 1040, 1069, and 1247 as numbered in the above Cas9 reference sequence, or a corresponding amino acid residue in another Cas9 polypeptide. In some embodiments, the cytidine deaminase is inserted at the C-terminus of an amino acid selected from the group consisting of: 1016, 1023, 1029, 1040, 1069, and 1247 as numbered in the above Cas9 reference sequence, or a corresponding amino acid residue in another Cas9 polypeptide. In some embodiments, the cytidine deaminase is inserted to replace an amino acid selected from the group consisting of: 1016, 1023, 1029, 1040, 1069, and 1247 as numbered in the above Cas9 reference sequence, or a corresponding amino acid residue in another Cas9 polypeptide.

[0286] In some embodiments, the deaminase (e.g., adenosine deaminase, cytidine deaminase, or adenosine deaminase and cytidine deaminase) is inserted at amino acid residue 768 as numbered in the above Cas9 reference sequence, or a corresponding amino acid residue in another Cas9 polypeptide. In some embodiments, the deaminase (e.g., adenosine deaminase, cytidine deaminase, or adenosine deaminase and cytidine deaminase) is inserted at the N-terminus of amino acid residue 768 as numbered in the above Cas9 reference sequence, or a corresponding amino acid residue in another Cas9 polypeptide. In some embodiments, the deaminase (e.g., adenosine deaminase, cytidine deaminase, or adenosine deaminase and cytidine deaminase) is inserted at the C-terminus of amino acid residue 768 as numbered in the above Cas9 reference sequence, or a corresponding amino acid residue in another Cas9 polypeptide. In some embodiments, the deaminase (e.g., adenosine deaminase, cytidine deaminase, or adenosine deaminase and cytidine deaminase) is inserted to replace amino acid residue 768 as numbered in the above Cas9 reference sequence, or a corresponding amino acid residue in another Cas9 polypeptide.

[0287] In some embodiments, the deaminase (e.g., adenosine deaminase, cytidine deaminase, or adenosine deaminase and cytidine deaminase) is inserted at amino acid residue 791 or is inserted at amino acid residue 792, as numbered in the above Cas9 reference sequence, or a corresponding amino acid residue in another Cas9 polypeptide. In some embodiments, the deaminase (e.g., adenosine deaminase, cytidine deaminase, or adenosine deaminase and cytidine deaminase) is inserted at the N-terminus of amino acid residue 791 or is inserted at the N-terminus of amino acid 792, as numbered in the above Cas9 reference sequence, or a corresponding amino acid residue in another Cas9 polypeptide. In some embodiments, the deaminase (e.g., adenosine deaminase, cytidine deaminase, or adenosine deaminase and cytidine deaminase) is inserted at the C-terminus of amino acid 791 or is inserted at the N-terminus of amino acid 792, as numbered in the above Cas9 reference sequence, or a corresponding amino acid residue in another Cas9 polypeptide. In some embodiments, the deaminase (e.g., adenosine deaminase, cytidine deaminase, or adenosine deaminase and cytidine deaminase) is inserted to replace amino acid 791, or is inserted to replace amino acid 792, as numbered in the above Cas9 reference sequence, or a corresponding amino acid residue in another Cas9 polypeptide.

[0288] In some embodiments, the deaminase (e.g., adenosine deaminase, cytidine deaminase, or adenosine deaminase and cytidine deaminase) is inserted at amino acid residue 1016 as numbered in the above Cas9 reference sequence, or a corresponding amino acid residue in another Cas9 polypeptide. In some embodiments, the deaminase (e.g., adenosine deaminase, cytidine deaminase, or adenosine deaminase and cytidine deaminase) is inserted at the N-terminus of amino acid residue 1016 as numbered in the above Cas9 reference sequence, or a corresponding amino acid residue in another Cas9 polypeptide. In some embodiments, the deaminase (e.g., adenosine deaminase, cytidine deaminase, or adenosine deaminase and cytidine deaminase) is inserted at the C-terminus of amino acid residue 1016 as numbered in the above Cas9 reference sequence, or a corresponding amino acid residue in another Cas9 polypeptide. In some embodiments, the deaminase (e.g., adenosine deaminase, cytidine deaminase, or adenosine deaminase and cytidine deaminase) is inserted to replace amino acid residue 1016 as numbered in the above Cas9 reference sequence, or a corresponding amino acid residue in another Cas9 polypeptide.

[0289] In some embodiments, the deaminase (e.g., adenosine deaminase, cytidine deaminase, or adenosine deaminase and cytidine deaminase) is inserted at amino acid residue 1022, or is inserted at amino acid residue 1023, as numbered in the above Cas9 reference sequence, or a corresponding amino acid residue in another Cas9 polypeptide. In some embodiments, the deaminase (e.g., adenosine deaminase, cytidine deaminase, or adenosine deaminase and cytidine deaminase) is inserted at the N-terminus of amino acid residue 1022 or is inserted at the N-terminus of amino acid residue 1023, as numbered in the above Cas9 reference sequence, or a corresponding amino acid residue in another Cas9 polypeptide. In some embodiments, the deaminase (e.g., adenosine deaminase, cytidine deaminase, or adenosine deaminase and cytidine deaminase) is inserted at the C-terminus of amino acid residue 1022 or is inserted at the C-terminus of amino acid residue 1023, as numbered in the above Cas9 reference sequence, or a corresponding amino acid residue in another Cas9 polypeptide. In some embodiments, the deaminase (e.g., adenosine deaminase, cytidine deaminase, or adenosine deaminase and cytidine deaminase) is inserted to replace amino acid residue 1022, or is inserted to replace amino acid residue 1023, as numbered in the above Cas9 reference sequence, or a corresponding amino acid residue in another Cas9 polypeptide.

[0290] In some embodiments, the deaminase (e.g., adenosine deaminase, cytidine deaminase, or adenosine deaminase and cytidine deaminase) is inserted at amino acid residue 1026, or is inserted at amino acid residue 1029, as numbered in the above Cas9 reference sequence, or a corresponding amino acid residue in another Cas9 polypeptide. In some embodiments, the deaminase (e.g., adenosine deaminase, cytidine deaminase, or adenosine deaminase and cytidine deaminase) is inserted at the N-terminus of amino acid residue 1026 or is inserted at the N-terminus of amino acid residue 1029, as numbered in the above Cas9 reference sequence, or a corresponding amino acid residue in another Cas9 polypeptide. In some embodiments, the deaminase (e.g., adenosine deaminase, cytidine deaminase, or adenosine deaminase and cytidine deaminase) is inserted at the C-terminus of amino acid residue 1026 or is inserted at the C-terminus of amino acid residue 1029, as numbered in the above Cas9 reference sequence, or a corresponding amino acid residue in another Cas9 polypeptide. In some embodiments, the deaminase (e.g., adenosine deaminase, cytidine deaminase, or adenosine deaminase and cytidine deaminase) is inserted to replace amino acid residue 1026, or is inserted to replace amino acid residue 1029, as numbered in the above Cas9 reference sequence, or corresponding amino acid residue in another Cas9 polypeptide.

[0291] In some embodiments, the deaminase (e.g., adenosine deaminase, cytidine deaminase, or adenosine deaminase and cytidine deaminase) is inserted at amino acid residue 1040 as numbered in the above Cas9 reference sequence, or a corresponding amino acid residue in another Cas9 polypeptide. In some embodiments, the deaminase (e.g., adenosine deaminase, cytidine deaminase, or adenosine deaminase and cytidine deaminase) is inserted at the N-terminus of amino acid residue 1040 as numbered in the above Cas9 reference sequence, or a corresponding amino acid residue in another Cas9 polypeptide. In some embodiments, the deaminase (e.g., adenosine deaminase, cytidine deaminase, or adenosine deaminase and cytidine deaminase) is inserted at the C-terminus of amino acid residue 1040 as numbered in the above Cas9 reference sequence, or a corresponding amino acid residue in another Cas9 polypeptide. In some embodiments, the deaminase (e.g., adenosine deaminase, cytidine deaminase, or adenosine deaminase and cytidine deaminase) is inserted to replace amino acid residue 1040 as numbered in the above Cas9 reference sequence, or a corresponding amino acid residue in another Cas9 polypeptide.

[0292] In some embodiments, the deaminase (e.g., adenosine deaminase, cytidine deaminase, or adenosine deaminase and cytidine deaminase) is inserted at amino acid residue 1052, or is inserted at amino acid residue 1054, as numbered in the above Cas9 reference sequence, or a corresponding amino acid residue in another Cas9 polypeptide. In some embodiments, the deaminase (e.g., adenosine deaminase, cytidine deaminase, or adenosine deaminase and cytidine deaminase) is inserted at the N-terminus of amino acid residue 1052 or is inserted at the N-terminus of amino acid residue 1054, as numbered in the above Cas9 reference sequence, or a corresponding amino acid residue in another Cas9 polypeptide. In some embodiments, the deaminase (e.g., adenosine deaminase, cytidine deaminase, or adenosine deaminase and cytidine deaminase) is inserted at the C-terminus of amino acid residue 1052 or is inserted at the C-terminus of amino acid residue 1054, as numbered in the above Cas9 reference sequence, or a corresponding amino acid residue in another Cas9 polypeptide. In some embodiments, the deaminase (e.g., adenosine deaminase, cytidine deaminase, or adenosine deaminase and cytidine deaminase) is inserted to replace amino acid residue 1052, or is inserted to replace amino acid residue 1054, as numbered in the above Cas9 reference sequence, or a corresponding amino acid residue in another Cas9 polypeptide.

[0293] In some embodiments, the deaminase (e.g., adenosine deaminase, cytidine deaminase, or adenosine deaminase and cytidine deaminase) is inserted at amino acid residue 1067, or is inserted at amino acid residue 1068, or is inserted at amino acid residue 1069, as numbered in the above Cas9 reference sequence, or a corresponding amino acid residue in another Cas9 polypeptide. In some embodiments, the deaminase (e.g., adenosine deaminase, cytidine deaminase, or adenosine deaminase and cytidine deaminase) is inserted at the N-terminus of amino acid residue 1067 or is inserted at the N-terminus of amino acid residue 1068 or is inserted at the N-terminus of amino acid residue 1069, as numbered in the above Cas9 reference sequence, or a corresponding amino acid residue in another Cas9 polypeptide. In some embodiments, the deaminase (e.g., adenosine deaminase, cytidine deaminase, or adenosine deaminase and cytidine deaminase) is inserted at the C-terminus of amino acid residue 1067 or is inserted at the C-terminus of amino acid residue 1068 or is inserted at the C-terminus of amino acid residue 1069, as numbered in the above Cas9 reference sequence, or a corresponding amino acid residue in another Cas9 polypeptide. In some embodiments, the deaminase (e.g., adenosine deaminase, cytidine deaminase, or adenosine deaminase and cytidine deaminase) is inserted to replace amino acid residue 1067, or is inserted to replace amino acid residue 1068, or is inserted to replace amino acid residue 1069, as numbered in the above Cas9 reference sequence, or a corresponding amino acid residue in another Cas9 polypeptide.

[0294] In some embodiments, the deaminase (e.g., adenosine deaminase, cytidine deaminase, or adenosine deaminase and cytidine deaminase) is inserted at amino acid residue 1246, or is inserted at amino acid residue 1247, or is inserted at amino acid residue 1248, as numbered in the above Cas9 reference sequence, or a corresponding amino acid residue in another Cas9 polypeptide. In some embodiments, the deaminase (e.g., adenosine deaminase, cytidine deaminase, or adenosine deaminase and cytidine deaminase) is inserted at the N-terminus of amino acid residue 1246 or is inserted at the N-terminus of amino acid residue 1247 or is inserted at the N-terminus of amino acid residue 1248, as numbered in the above Cas9 reference sequence, or a corresponding amino acid residue in another Cas9 polypeptide. In some embodiments, the deaminase (e.g., adenosine deaminase, cytidine deaminase, or adenosine deaminase and cytidine deaminase) is inserted at the C-terminus of amino acid residue 1246 or is inserted at the C-terminus of amino acid residue 1247 or is inserted at the C-terminus of amino acid residue 1248, as numbered in the above Cas9 reference sequence, or a corresponding amino acid residue in another Cas9 polypeptide. In some embodiments, the deaminase (e.g., adenosine deaminase, cytidine deaminase, or adenosine deaminase and cytidine deaminase) is inserted to replace amino acid residue 1246, or is inserted to replace amino acid residue 1247, or is inserted to replace amino acid residue 1248, as numbered in the above Cas9 reference sequence, or a corresponding amino acid residue in another Cas9 polypeptide.

[0295] In some embodiments, a heterologous polypeptide (e.g., deaminase) is inserted in a flexible loop of a Cas9 polypeptide. The flexible loop portions can be selected from the group consisting of 530-537, 569-570, 686-691, 943-947, 1002-1025, 1052-1077, 1232-1247, or 1298-1300 as numbered in the above Cas9 reference sequence, or a corresponding amino acid residue in another Cas9 polypeptide. The flexible loop portions can be selected from the group consisting of: 1-529, 538-568, 580-685, 692-942, 948-1001, 1026-1051, 1078-1231, or 1248-1297 as numbered in the above Cas9 reference sequence, or a corresponding amino acid residue in another Cas9 polypeptide.

[0296] A heterologous polypeptide (e.g., adenine deaminase) can be inserted into a Cas9 polypeptide region corresponding to amino acid residues: 1017-1069, 1242-1247, 1052-1056, 1060-1077, 1002-1003, 943-947, 530-537, 568-579, 686-691, 1242-1247, 1298-1300, 1066-1077, 1052-1056, or 1060-1077 as numbered in the above Cas9 reference sequence, or a corresponding amino acid residue in another Cas9 polypeptide.

[0297] A heterologous polypeptide (e.g., adenine deaminase) can be inserted in place of a deleted region of a Cas9 polypeptide. The deleted region can correspond to an N-terminal or C-terminal portion of the Cas9 polypeptide. In some embodiments, the deleted region corresponds to residues 792-872 as numbered in the above Cas9 reference sequence, or a corresponding amino acid residue in another Cas9 polypeptide. In some embodiments, the deleted region corresponds to residues 792-906 as numbered in the above Cas9 reference sequence, or a corresponding amino acid residue in another Cas9 polypeptide. In some embodiments, the deleted region corresponds to residues 2-791 as numbered in the above Cas9 reference sequence, or a corresponding amino acid residue in another Cas9 polypeptide. In some embodiments, the deleted region corresponds to residues 1017-1069 as numbered in the above Cas9 reference sequence, or corresponding amino acid residues thereof.

[0298] Exemplary internal fusions base editors (alternatively “inlaid base editors”) are provided in Table 4 below:

TABLE 4
Insertion loci in Cas9 proteins

| BE ID | Modification | Other ID |
|---|---|---|
| IBE001 | Cas9 TadA ins 1015 | ISLAY01 |
| IBE002 | Cas9 TadA ins 1022 | ISLAY02 |
| IBE003 | Cas9 TadA ins 1029 | ISLAY03 |
| IBE004 | Cas9 TadA ins 1040 | ISLAY04 |
| IBE005 | Cas9 TadA ins 1068 | ISLAY05 |
| IBE006 | Cas9 TadA ins 1247 | ISLAY06 |
| IBE007 | Cas9 TadA ins 1054 | ISLAY07 |
| IBE008 | Cas9 TadA ins 1026 | ISLAY08 |
| IBE009 | Cas9 TadA ins 768 | ISLAY09 |
| IBE020 | delta HNH TadA 792 | ISLAY20 |
| IBE021 | N-term fusion single TadA helix truncated 165-end | ISLAY21 |
| IBE029 | TadA-Circular Permutant116 ins1067 | ISLAY29 |
| IBE031 | TadA- Circular Permutant 136 ins1248 | ISLAY31 |
| IBE032 | TadA- Circular Permutant 136ins 1052 | ISLAY32 |
| IBE035 | delta 792-872 TadA ins | ISLAY35 |
| IBE036 | delta 792-906 TadA ins | ISLAY36 |
| IBE043 | TadA-Circular Permutant 65 ins1246 | ISLAY43 |
| IBE044 | TadA ins C-term truncate2 791 | ISLAY44 |

[0299] Exemplary internal fusion base editor amino acid and nucleotide sequences are provided below, where a SpCas9 domain is indicated by plain text, a linker is indicated by bold text, a TadA*8.20 deaminase domain is indicated by italic-underlined text, and a bipartite nuclear localization signal is indicated by underlined text. The terms “NGA” and “NGC” indicate the PAM sequence recognized by the SpCas9 domain.

NGA_IBE11 amino acid sequence:
(SEQ ID NO: 633)
MDKKYSIGLAIGTNSVGWAVITDEYKVPSKKFKVLGNTDRHSIKKNLIGALLFDSGETAEATRL
KRTARRRYTRRKNRICYLQEIFSNEMAKVDDSFFHRLEESFLVEEDKKHERHPIFGNIVDEVAY
HEKYPTIYHLRKKLVDSTDKADLRLIYLALAHMIKFRGHFLIEGDLNPDNSDVDKLFIQLVQTY
NQLFEENPINASGVDAKAILSARLSKSRRLENLIAQLPGEKKNGLFGNLIALSLGLTPNFKSNF
DLAEDAKLQLSKDTYDDDLDNLLAQIGDQYADLFLAAKNLSDAILLSDILRVNTEITKAPLSAS
MIKRYDEHHQDLTLLKALVRQQLPEKYKEIFFDQSKNGYAGYIDGGASQEEFYKFIKPILEKMD
GTEELLVKLNREDLLRKQRTFDNGSIPHQIHLGELHAILRRQEDFYPFLKDNREKIEKILTFRI
PYYVGPLARGNSRFAWMTRKSEETITPWNFEEVVDKGASAQSFIERMTNFDKNLPNEKVLPKHS
LLYEYFTVYNELTKVKYVTEGMRKPAFLSGEQKKAIVDLLFKTNRKVTVKQLKEDYFKKIECFD
SVEISGVEDRFNASLGTYHDLLKIIKDKDFLDNEENEDILEDIVLTLTLFEDREMIEERLKTYA
HLFDDKVMKQLKRRRYTGWGRLSRKLINGIRDKQSGKTILDFLKSDGFANRNFMQLIHDDSLTF
KEDIQKAQVSGQGDSLHEHIANLAGSPAIKKGILQTVKVVDELVKVMGRHKPENIVIEMARENQ
TTQKGQKNSRERMKRIEEGIKELGSQILKEHPVENTQLQNEKLYLYYLQNGRDMYVDQELDINR
LSDYDVDHIVPQSFLKDDSIDNKVLTRSDKNRGKSDNVPSEEVVKKMKNYWRQLLNAKLITQRK
FDNLTKAERGGLSELDKAGFIKRQLVETRQITKHVAQILDSRMNTKYDENDKLIREVKVITLKS
KLVSDFRKDFQFYKVREINNYHHAHDAYLNAVVGTALIKKYPKLESEFVYGDYKVYDVRKMIAK
SEGSSGSETPGTSESATPESSGSEVEFSHEYWMRHALTLAKRARDEREVPVGAVLVLNNRVIGE
GWNRAIGLHDPTAHAEIMALRQGGLVMQNYRLYDATLYSTFEPCVMCAGAMIHSRIGRVVFGVR
NAKTGAAGSLMDVLHHPGMNHRVEITEGILADECAALLCRFFRMPRRVFNAQKKAQSSTDQEIG
KATAKYFFYSNIMNFFKTEITLANGEIRKRPLIETNGETGEIVWDKGRDFATVRKVLSMPQVNI
VKKTEVQTGGFSKESILPKRNSDKLIARKKDWDPKKYGGFVSPTVAYSVLVVAKVEKGKSKKLK
SVKELLGITIMERSSFEKNPIDFLEAKGYKEVKKDLIIKLPKYSLFELENGRKRMLASARELQK
GNELALPSKYVNFLYLASHYEKLKGSPEDNEQKQLFVEQHKHYLDEIIEQISEFSKRVILADAN
LDKVLSAYNKHRDKPIREQAENIIHLFTLTNLGAPAAFKYFDTTIDRKQYRSTKEVLDATLIHQ
SITGLYETRIDLSQLGGDEGADKRTADGSEFESPKKKRKV
NGA_IBE11 nucleotide sequence:
(SEQ ID NO: 634)
atggacaagaagtactctatcggactggccatcggcaccaactctgttggatgggccgtgatca
ccgacgagtacaaggtgcccagcaagaaattcaaggtgctgggcaacaccgaccggcacagcat
caagaagaatctgatcggcgccctgctgttcgactctggcgaaacagccgaagccaccagactg
aagagaaccgccaggcggagatacacccggcggaagaaccggatctgctacctgcaagagatct
tcagcaacgagatggccaaggtggacgacagcttcttccacagactggaagagtccttcctggt
ggaagaggacaagaagcacgagcggcaccccatcttcggcaacatcgtggatgaggtggcctac
cacgagaagtaccccaccatctaccacctgagaaagaaactggtggacagcaccgacaaggccg
acctgagactgatctacctggctctggcccacatgatcaagttccggggccactttctgatcga
gggcgatctgaaccccgacaacagcgacgtggacaagctgttcatccagctggtgcagacctac
aaccagctgttcgaggaaaaccccatcaacgcctctggcgtggacgccaaggctatcctgtctg
ccagactgagcaagagcagaaggctggaaaacctgatcgcccagctgcctggcgagaagaagaa
tggcctgttcggcaacctgattgccctgagcctgggactgacccctaacttcaagagcaacttc
gacctggccgaggatgccaaactgcagctgagcaaggacacctacgacgacgacctggacaatc
tgctggcccagatcggcgatcagtacgccgacttgtttctggccgccaagaacctgtccgacgc
catcctgctgagcgatatcctgagagtgaacaccgagatcacaaaggcccctctgagcgcctct
atgatcaagagatacgacgagcaccaccaggatctgaccctgctgaaggccctcgttagacagc
agctgccagagaagtacaaagagattttcttcgatcagtccaagaacggctacgccggctacat
tgatggcggagccagccaagaggaattctacaagttcatcaagcccatcctggaaaagatggac
ggcaccgaggaactgctggtcaagctgaacagagaggacctgctgcggaagcagcggaccttcg
acaatggctctatccctcaccagatccacctgggagagctgcacgccattctgcggagacaaga
ggacttttacccattcctgaaggacaaccgggaaaagatcgagaagatcctgaccttcaggatc
ccctactacgtgggaccactggccagaggcaatagcagattcgcctggatgaccagaaagagcg
aggaaaccatcacaccctggaacttcgaggaagtggtggacaagggcgccagcgctcagtcctt
catcgagcggatgaccaacttcgataagaacctgcctaacgagaaggtgctgcccaagcactcc
ctgctgtatgagtacttcaccgtgtacaacgagctgaccaaagtgaaatacgtgaccgagggaa
tgagaaagcccgcctttctgagcggcgagcagaaaaaggccattgtggatctgctgttcaagac
caaccggaaagtgaccgtgaagcagctgaaagaggactacttcaagaaaatcgagtgcttcgac
agcgtggaaatcagcggcgtggaagatcggttcaatgccagcctgggcacataccacgacctgc
tgaaaattatcaaggacaaggacttcctggacaacgaagagaacgaggacattctcgaggacat
cgtgctgaccctgacactgtttgaggacagagagatgatcgaggaacggctgaaaacatacgcc
cacctgttcgacgacaaagtgatgaagcaactgaagcggaggcggtacacaggctggggcagac
tgtctcggaagctgatcaacggcatccgggataagcagtccggcaagacaatcctggatttcct
gaagtccgacggcttcgccaacagaaacttcatgcagctgatccacgacgacagcctgaccttt
aaagaggacatccagaaagcccaggtgtccggccaaggcgattctctgcacgagcacattgcca
acctggccggatctcccgccattaagaagggcatcctgcagacagtgaaggtggtggacgagct
tgtgaaagtgatgggcagacacaagcccgagaacatcgtgatcgaaatggccagagagaaccag
accacacagaagggccagaagaacagccgcgagagaatgaagcggatcgaagagggcatcaaag
agctgggcagccagatcctgaaagaacaccccgtggaaaacacccagctgcagaacgagaagct
gtacctgtactacctgcagaatggacgggatatgtacgtggaccaagagctggacatcaaccgg
ctgagcgactacgatgtggaccatatcgtgccccagagctttctgaaggacgactccatcgata
acaaggtcctgaccagaagcgacaagaaccggggcaagagcgataacgtgccctccgaagaggt
ggtcaagaagatgaagaactactggcgacagctgctgaacgccaagctgattacccagcggaag
ttcgataacctgaccaaggccgagagaggcggcctgagcgaacttgataaggccggcttcatta
agcggcagctggtggaaacccggcagatcaccaaacacgtggcacagattctggactcccggat
gaacactaagtacgacgagaatgacaagctgatccgggaagtgaaagtcatcaccctgaagtct
aagctggtgtccgatttccggaaggatttccagttctacaaagtgcgggaaatcaacaactacc
atcacgcccacgacgcctacctgaatgccgttgttggaacagccctgatcaagaagtatcccaa
gctggaaagcgagttcgtgtacggcgactacaaggtgtacgacgtgcggaagatgatcgccaag
agcgaaggatcttctggaagcgaaaccccaggcaccagcgagtctgccacaccagaatcatctg
gcagcgaggtcgagttctctcacgaatattggatgagacacgctctcaccctggctaagagagc
cagggacgaaagagaggtgccagttggcgctgtcctggtgttgaacaatcgcgtcatcggagaa
ggatggaatcgcgccattggcctgcacgatccaaccgcacatgccgaaattatggctctgcggc
aaggcggcctcgtgatgcaaaattacagactgtacgatgctaccctctactccaccttcgagcc
ctgtgtcatgtgtgctggggcaatgattcactcccggattggccgcgtggtgtttggagtgcgg
aatgccaagactggcgccgctggatctctgatggacgtcctgcaccatcctgggatgaaccacc
gggtcgagatcacagagggaattctggctgacgagtgcgctgccctgctgtgcaggttctttag
aatgcctagaagggtgttcaacgcccagaaaaaagctcagagcagcaccgatcaagagatcggc
aaggctaccgccaagtactttttctacagcaacatcatgaactttttcaagacagagatcaccc
tggccaacggcgagatccggaaaagacccctgatcgagacaaacggcgaaaccggggagatcgt
gtgggataagggcagagattttgccacagtgcggaaagtgctgagcatgccccaagtgaatatc
gtgaagaaaaccgaggtgcagacaggcggcttcagcaaagagtctatcctgcctaagcggaaca
gcgataagctgatcgccagaaagaaggactgggaccccaagaaatacggcggcttcgtgtctcc
taccgtggcctattctgtgctggtggtggccaaagtggaaaagggcaagtccaaaaagctcaag
agcgtgaaagagctgctggggatcaccatcatggaaagaagcagctttgagaagaacccgatcg
actttctggaagccaagggctacaaagaagtcaagaaggacctcatcatcaagctccccaagta
cagcctgttcgagctggaaaatggccggaagcggatgctggcctctgctagagaactgcagaag
ggaaacgagctggccctgcctagcaaatatgtgaacttcctgtacctggccagccactatgaga
agctgaagggcagccccgaggacaatgagcaaaagcagctgtttgtggaacagcacaagcacta
cctggacgagatcatcgagcagatcagcgagttctccaagagagtgatcctggccgacgctaac
ctggataaggtgctgtctgcctataacaagcaccgggacaagcctatcagagagcaggccgaga
atatcatccacctgtttaccctgaccaacctgggagcccctgccgccttcaagtacttcgacac
caccatcgaccggaagcagtaccggtccaccaaagaggtgctggacgccacactgatccaccag
tctatcaccggcctgtacgaaacccggatcgacctgtctcagctcggaggcgacgaaggcgccg
ataagagaaccgccgatggctctgagttcgagagccccaagaaaaagcgcaaagtgtaa
NGA_IBE12 amino acid sequence:
(SEQ ID NO: 635)
MDKKYSIGLAIGTNSVGWAVITDEYKVPSKKFKVLGNTDRHSIKKNLIGALLFDSGETAEATRL
KRTARRRYTRRKNRICYLQEIFSNEMAKVDDSFFHRLEESFLVEEDKKHERHPIFGNIVDEVAY
HEKYPTIYHLRKKLVDSTDKADLRLIYLALAHMIKFRGHFLIEGDLNPDNSDVDKLFIQLVQTY
NQLFEENPINASGVDAKAILSARLSKSRRLENLIAQLPGEKKNGLFGNLIALSLGLTPNFKSNF
DLAEDAKLQLSKDTYDDDLDNLLAQIGDQYADLFLAAKNLSDAILLSDILRVNTEITKAPLSAS
MIKRYDEHHQDLTLLKALVRQQLPEKYKEIFFDQSKNGYAGYIDGGASQEEFYKFIKPILEKMD
GTEELLVKLNREDLLRKQRTFDNGSIPHQIHLGELHAILRRQEDFYPFLKDNREKIEKILTFRI
PYYVGPLARGNSRFAWMTRKSEETITPWNFEEVVDKGASAQSFIERMTNFDKNLPNEKVLPKHS
LLYEYFTVYNELTKVKYVTEGMRKPAFLSGEQKKAIVDLLFKTNRKVTVKQLKEDYFKKIECFD
SVEISGVEDRFNASLGTYHDLLKIIKDKDFLDNEENEDILEDIVLTLTLFEDREMIEERLKTYA
HLFDDKVMKQLKRRRYTGWGRLSRKLINGIRDKQSGKTILDFLKSDGFANRNFMQLIHDDSLTF
KEDIQKAQVSGQGDSLHEHIANLAGSPAIKKGILQTVKVVDELVKVMGRHKPENIVIEMARENQ
TTQKGQKNSRERMKRIEEGIKELGSQILKEHPVENTQLQNEKLYLYYLQNGRDMYVDQELDINR
LSDYDVDHIVPQSFLKDDSIDNKVLTRSDKNRGKSDNVPSEEVVKKMKNYWRQLLNAKLITQRK
FDNLTKAERGGLSELDKAGFIKRQLVETRQITKHVAQILDSRMNTKYDENDKLIREVKVITLKS
KLVSDFRKDFQFYKVREINNYHHAHDAYLNAVVGTALIKKYPKLESEFVYGDYKVYDVRKMIAK
SEQEIGSSGSETPGTSESATPESSGSEVEFSHEYWMRHALTLAKRARDEREVPVGAVLVLNNRV
IGEGWNRAIGLHDPTAHAEIMALRQGGLVMQNYRLYDATLYSTFEPCVMCAGAMIHSRIGRVVF
GVRNAKTGAAGSLMDVLHHPGMNHRVEITEGILADECAALLCRFFRMPRRVFNAQKKAQSSTDG
KATAKYFFYSNIMNFFKTEITLANGEIRKRPLIETNGETGEIVWDKGRDFATVRKVLSMPQVNI
VKKTEVQTGGFSKESILPKRNSDKLIARKKDWDPKKYGGFVSPTVAYSVLVVAKVEKGKSKKLK
SVKELLGITIMERSSFEKNPIDFLEAKGYKEVKKDLIIKLPKYSLFELENGRKRMLASARELQK
GNELALPSKYVNFLYLASHYEKLKGSPEDNEQKQLFVEQHKHYLDEIIEQISEFSKRVILADAN
LDKVLSAYNKHRDKPIREQAENIIHLFTLTNLGAPAAFKYFDTTIDRKQYRSTKEVLDATLIHQ
SITGLYETRIDLSQLGGDEGADKRTADGSEFESPKKKRKV
NGA_IBE12 nucleotide sequence:
(SEQ ID NO: 636)
atggacaagaagtactctatcggactggccatcggcaccaactctgttggatgggccgtgatca
ccgacgagtacaaggtgcccagcaagaaattcaaggtgctgggcaacaccgaccggcacagcat
caagaagaatctgatcggcgccctgctgttcgactctggcgaaacagccgaagccaccagactg
aagagaaccgccaggcggagatacacccggcggaagaaccggatctgctacctgcaagagatct
tcagcaacgagatggccaaggtggacgacagcttcttccacagactggaagagtccttcctggt
ggaagaggacaagaagcacgagcggcaccccatcttcggcaacatcgtggatgaggtggcctac
cacgagaagtaccccaccatctaccacctgagaaagaaactggtggacagcaccgacaaggccg
acctgagactgatctacctggctctggcccacatgatcaagttccggggccactttctgatcga
gggcgatctgaaccccgacaacagcgacgtggacaagctgttcatccagctggtgcagacctac
aaccagctgttcgaggaaaaccccatcaacgcctctggcgtggacgccaaggctatcctgtctg
ccagactgagcaagagcagaaggctggaaaacctgatcgcccagctgcctggcgagaagaagaa
tggcctgttcggcaacctgattgccctgagcctgggactgacccctaacttcaagagcaacttc
gacctggccgaggatgccaaactgcagctgagcaaggacacctacgacgacgacctggacaatc
tgctggcccagatcggcgatcagtacgccgacttgtttctggccgccaagaacctgtccgacgc
catcctgctgagcgatatcctgagagtgaacaccgagatcacaaaggcccctctgagcgcctct
atgatcaagagatacgacgagcaccaccaggatctgaccctgctgaaggccctcgttagacagc
agctgccagagaagtacaaagagattttcttcgatcagtccaagaacggctacgccggctacat
tgatggcggagccagccaagaggaattctacaagttcatcaagcccatcctggaaaagatggac
ggcaccgaggaactgctggtcaagctgaacagagaggacctgctgcggaagcagcggaccttcg
acaatggctctatccctcaccagatccacctgggagagctgcacgccattctgcggagacaaga
ggacttttacccattcctgaaggacaaccgggaaaagatcgagaagatcctgaccttcaggatc
ccctactacgtgggaccactggccagaggcaatagcagattcgcctggatgaccagaaagagcg
aggaaaccatcacaccctggaacttcgaggaagtggtggacaagggcgccagcgctcagtcctt
catcgagcggatgaccaacttcgataagaacctgcctaacgagaaggtgctgcccaagcactcc
ctgctgtatgagtacttcaccgtgtacaacgagctgaccaaagtgaaatacgtgaccgagggaa
tgagaaagcccgcctttctgagcggcgagcagaaaaaggccattgtggatctgctgttcaagac
caaccggaaagtgaccgtgaagcagctgaaagaggactacttcaagaaaatcgagtgcttcgac
agcgtggaaatcagcggcgtggaagatcggttcaatgccagcctgggcacataccacgacctgc
tgaaaattatcaaggacaaggacttcctggacaacgaagagaacgaggacattctcgaggacat
cgtgctgaccctgacactgtttgaggacagagagatgatcgaggaacggctgaaaacatacgcc
cacctgttcgacgacaaagtgatgaagcaactgaagcggaggcggtacacaggctggggcagac
tgtctcggaagctgatcaacggcatccgggataagcagtccggcaagacaatcctggatttcct
gaagtccgacggcttcgccaacagaaacttcatgcagctgatccacgacgacagcctgaccttt
aaagaggacatccagaaagcccaggtgtccggccaaggcgattctctgcacgagcacattgcca
acctggccggatctcccgccattaagaagggcatcctgcagacagtgaaggtggtggacgagct
tgtgaaagtgatgggcagacacaagcccgagaacatcgtgatcgaaatggccagagagaaccag
accacacagaagggccagaagaacagccgcgagagaatgaagcggatcgaagagggcatcaaag
agctgggcagccagatcctgaaagaacaccccgtggaaaacacccagctgcagaacgagaagct
gtacctgtactacctgcagaatggacgggatatgtacgtggaccaagagctggacatcaaccgg
ctgagcgactacgatgtggaccatatcgtgccccagagctttctgaaggacgactccatcgata
acaaggtcctgaccagaagcgacaagaaccggggcaagagcgataacgtgccctccgaagaggt
ggtcaagaagatgaagaactactggcgacagctgctgaacgccaagctgattacccagcggaag
ttcgataacctgaccaaggccgagagaggcggcctgagcgaacttgataaggccggcttcatta
agcggcagctggtggaaacccggcagatcaccaaacacgtggcacagattctggactcccggat
gaacactaagtacgacgagaatgacaagctgatccgggaagtgaaagtcatcaccctgaagtct
aagctggtgtccgatttccggaaggatttccagttctacaaagtgcgggaaatcaacaactacc
atcacgcccacgacgcctacctgaatgccgttgttggaacagccctgatcaagaagtatcccaa
gctggaaagcgagttcgtgtacggcgactacaaggtgtacgacgtgcggaagatgatcgccaag
agcgaacaagagatcggatcttctggaagcgaaaccccaggcaccagcgagtctgccacaccag
aatcatctggcagcgaggtcgagttctctcacgaatattggatgagacacgctctcaccctggc
taagagagccagggacgaaagagaggtgccagttggcgctgtcctggtgttgaacaatcgcgtc
atcggagaaggatggaatcgcgccattggcctgcacgatccaaccgcacatgccgaaattatgg
ctctgcggcaaggcggcctcgtgatgcaaaattacagactgtacgatgctaccctctactccac
cttcgagccctgtgtcatgtgtgctggggcaatgattcactcccggattggccgcgtggtgttt
ggagtgcggaatgccaagactggcgccgctggatctctgatggacgtcctgcaccatcctggga
tgaaccaccgggtcgagatcacagagggaattctggctgacgagtgcgctgccctgctgtgcag
gttctttagaatgcctagaagggtgttcaacgcccagaaaaaagctcagagcagcaccgatggc
aaggctaccgccaagtactttttctacagcaacatcatgaactttttcaagacagagatcaccc
tggccaacggcgagatccggaaaagacccctgatcgagacaaacggcgaaaccggggagatcgt
gtgggataagggcagagattttgccacagtgcggaaagtgctgagcatgccccaagtgaatatc
gtgaagaaaaccgaggtgcagacaggcggcttcagcaaagagtctatcctgcctaagcggaaca
gcgataagctgatcgccagaaagaaggactgggaccccaagaaatacggcggcttcgtgtctcc
taccgtggcctattctgtgctggtggtggccaaagtggaaaagggcaagtccaaaaagctcaag
agcgtgaaagagctgctggggatcaccatcatggaaagaagcagctttgagaagaacccgatcg
actttctggaagccaagggctacaaagaagtcaagaaggacctcatcatcaagctccccaagta
cagcctgttcgagctggaaaatggccggaagcggatgctggcctctgctagagaactgcagaag
ggaaacgagctggccctgcctagcaaatatgtgaacttcctgtacctggccagccactatgaga
agctgaagggcagccccgaggacaatgagcaaaagcagctgtttgtggaacagcacaagcacta
cctggacgagatcatcgagcagatcagcgagttctccaagagagtgatcctggccgacgctaac
ctggataaggtgctgtctgcctataacaagcaccgggacaagcctatcagagagcaggccgaga
atatcatccacctgtttaccctgaccaacctgggagcccctgccgccttcaagtacttcgacac
caccatcgaccggaagcagtaccggtccaccaaagaggtgctggacgccacactgatccaccag
tctatcaccggcctgtacgaaacccggatcgacctgtctcagctcggaggcgacgaaggcgccg
ataagagaaccgccgatggctctgagttcgagagccccaagaaaaagcgcaaagtgtaa
NGA_IBE16 amino acid sequence:
(SEQ ID NO: 637)
MDKKYSIGLAIGTNSVGWAVITDEYKVPSKKFKVLGNTDRHSIKKNLIGALLFDSGETAEATRL
KRTARRRYTRRKNRICYLQEIFSNEMAKVDDSFFHRLEESFLVEEDKKHERHPIFGNIVDEVAY
HEKYPTIYHLRKKLVDSTDKADLRLIYLALAHMIKFRGHFLIEGDLNPDNSDVDKLFIQLVQTY
NQLFEENPINASGVDAKAILSARLSKSRRLENLIAQLPGEKKNGLFGNLIALSLGLTPNFKSNF
DLAEDAKLQLSKDTYDDDLDNLLAQIGDQYADLFLAAKNLSDAILLSDILRVNTEITKAPLSAS
MIKRYDEHHQDLTLLKALVRQQLPEKYKEIFFDQSKNGYAGYIDGGASQEEFYKFIKPILEKMD
GTEELLVKLNREDLLRKQRTFDNGSIPHQIHLGELHAILRRQEDFYPFLKDNREKIEKILTFRI
PYYVGPLARGNSRFAWMTRKSEETITPWNFEEVVDKGASAQSFIERMTNFDKNLPNEKVLPKHS
LLYEYFTVYNELTKVKYVTEGMRKPAFLSGEQKKAIVDLLFKTNRKVTVKQLKEDYFKKIECFD
SVEISGVEDRFNASLGTYHDLLKIIKDKDFLDNEENEDILEDIVLTLTLFEDREMIEERLKTYA
HLFDDKVMKQLKRRRYTGWGRLSRKLINGIRDKQSGKTILDFLKSDGFANRNFMQLIHDDSLTF
KEDIQKAQVSGQGDSLHEHIANLAGSPAIKKGILQTVKVVDELVKVMGRHKPENIVIEMARENQ
TTQKGQKNSRERMKRIEEGIKELGSQILKEHPVENTQLQNEKLYLYYLQNGRDMYVDQELDINR
LSDYDVDHIVPQSFLKDDSIDNKVLTRSDKNRGKSDNVPSEEVVKKMKNYWRQLLNAKLITQRK
FDNLTKAERGGLSELDKAGFIKRQLVETRQITKHVAQILDSRMNTKYDENDKLIREVKVITLKS
KLVSDFRKDFQFYKVREINNYHHAHDAYLNAVVGTALIKKYPKLESEFVYGDYKVYDVRKMIAK
SEQEIGKATAKYFFYSNIMNFFKTEITLANGEIRKRPLIETNGETGEIVWDKGRDFATVRKVLS
MPQVNIVKKTEVQTGGFSKESILPKRNSDKLIARKKDWDPKKYGGFVSPTVAYSVLVVAKVEKG
KSKKLKSVKELLGITIMERSSFEKNPIDFLEAKGYKEVKKDLIIKLPKYSLFELENGRKRMLAS
ARELQKGNELALPSKYVNFLYLASHYEKLKGGSSGSETPGTSESATPESSGSEVEFSHEYWMRH
ALTLAKRARDEREVPVGAVLVLNNRVIGEGWNRAIGLHDPTAHAEIMALRQGGLVMQNYRLYDA
TLYSTFEPCVMCAGAMIHSRIGRVVFGVRNAKTGAAGSLMDVLHHPGMNHRVEITEGILADECA
ALLCRFFRMPRRVFNAQKKAQSSTDSPEDNEQKQLFVEQHKHYLDEIIEQISEFSKRVILADAN
LDKVLSAYNKHRDKPIREQAENIIHLFTLTNLGAPAAFKYFDTTIDRKQYRSTKEVLDATLIHQ
SITGLYETRIDLSQLGGDEGADKRTADGSEFESPKKKRKV
NGA_IBE16 nucleotide sequence:
(SEQ ID NO: 638)
atggacaagaagtactctatcggactggccatcggcaccaactctgttggatgggccgtgatca
ccgacgagtacaaggtgcccagcaagaaattcaaggtgctgggcaacaccgaccggcacagcat
caagaagaatctgatcggcgccctgctgttcgactctggcgaaacagccgaagccaccagactg
aagagaaccgccaggcggagatacacccggcggaagaaccggatctgctacctgcaagagatct
tcagcaacgagatggccaaggtggacgacagcttcttccacagactggaagagtccttcctggt
ggaagaggacaagaagcacgagcggcaccccatcttcggcaacatcgtggatgaggtggcctac
cacgagaagtaccccaccatctaccacctgagaaagaaactggtggacagcaccgacaaggccg
acctgagactgatctacctggctctggcccacatgatcaagttccggggccactttctgatcga
gggcgatctgaaccccgacaacagcgacgtggacaagctgttcatccagctggtgcagacctac
aaccagctgttcgaggaaaaccccatcaacgcctctggcgtggacgccaaggctatcctgtctg
ccagactgagcaagagcagaaggctggaaaacctgatcgcccagctgcctggcgagaagaagaa
tggcctgttcggcaacctgattgccctgagcctgggactgacccctaacttcaagagcaacttc
gacctggccgaggatgccaaactgcagctgagcaaggacacctacgacgacgacctggacaatc
tgctggcccagatcggcgatcagtacgccgacttgtttctggccgccaagaacctgtccgacgc
catcctgctgagcgatatcctgagagtgaacaccgagatcacaaaggcccctctgagcgcctct
atgatcaagagatacgacgagcaccaccaggatctgaccctgctgaaggccctcgttagacagc
agctgccagagaagtacaaagagattttcttcgatcagtccaagaacggctacgccggctacat
tgatggcggagccagccaagaggaattctacaagttcatcaagcccatcctggaaaagatggac
ggcaccgaggaactgctggtcaagctgaacagagaggacctgctgcggaagcagcggaccttcg
acaatggctctatccctcaccagatccacctgggagagctgcacgccattctgcggagacaaga
ggacttttacccattcctgaaggacaaccgggaaaagatcgagaagatcctgaccttcaggatc
ccctactacgtgggaccactggccagaggcaatagcagattcgcctggatgaccagaaagagcg
aggaaaccatcacaccctggaacttcgaggaagtggtggacaagggcgccagcgctcagtcctt
catcgagcggatgaccaacttcgataagaacctgcctaacgagaaggtgctgcccaagcactcc
ctgctgtatgagtacttcaccgtgtacaacgagctgaccaaagtgaaatacgtgaccgagggaa
tgagaaagcccgcctttctgagcggcgagcagaaaaaggccattgtggatctgctgttcaagac
caaccggaaagtgaccgtgaagcagctgaaagaggactacttcaagaaaatcgagtgcttcgac
agcgtggaaatcagcggcgtggaagatcggttcaatgccagcctgggcacataccacgacctgc
tgaaaattatcaaggacaaggacttcctggacaacgaagagaacgaggacattctcgaggacat
cgtgctgaccctgacactgtttgaggacagagagatgatcgaggaacggctgaaaacatacgcc
cacctgttcgacgacaaagtgatgaagcaactgaagcggaggcggtacacaggctggggcagac
tgtctcggaagctgatcaacggcatccgggataagcagtccggcaagacaatcctggatttcct
gaagtccgacggcttcgccaacagaaacttcatgcagctgatccacgacgacagcctgaccttt
aaagaggacatccagaaagcccaggtgtccggccaaggcgattctctgcacgagcacattgcca
acctggccggatctcccgccattaagaagggcatcctgcagacagtgaaggtggtggacgagct
tgtgaaagtgatgggcagacacaagcccgagaacatcgtgatcgaaatggccagagagaaccag
accacacagaagggccagaagaacagccgcgagagaatgaagcggatcgaagagggcatcaaag
agctgggcagccagatcctgaaagaacaccccgtggaaaacacccagctgcagaacgagaagct
gtacctgtactacctgcagaatggacgggatatgtacgtggaccaagagctggacatcaaccgg
ctgagcgactacgatgtggaccatatcgtgccccagagctttctgaaggacgactccatcgata
acaaggtcctgaccagaagcgacaagaaccggggcaagagcgataacgtgccctccgaagaggt
ggtcaagaagatgaagaactactggcgacagctgctgaacgccaagctgattacccagcggaag
ttcgataacctgaccaaggccgagagaggcggcctgagcgaacttgataaggccggcttcatta
agcggcagctggtggaaacccggcagatcaccaaacacgtggcacagattctggactcccggat
gaacactaagtacgacgagaatgacaagctgatccgggaagtgaaagtcatcaccctgaagtct
aagctggtgtccgatttccggaaggatttccagttctacaaagtgcgggaaatcaacaactacc
atcacgcccacgacgcctacctgaatgccgttgttggaacagccctgatcaagaagtatcccaa
gctggaaagcgagttcgtgtacggcgactacaaggtgtacgacgtgcggaagatgatcgccaag
agcgaacaagagatcggcaaggctaccgccaagtactttttctacagcaacatcatgaactttt
tcaagacagagatcaccctggccaacggcgagatccggaaaagacccctgatcgagacaaacgg
cgaaaccggggagatcgtgtgggataagggcagagattttgccacagtgcggaaagtgctgagc
atgccccaagtgaatatcgtgaagaaaaccgaggtgcagacaggcggcttcagcaaagagtcta
tcctgcctaagcggaacagcgataagctgatcgccagaaagaaggactgggaccccaagaaata
cggcggcttcgtgtctcctaccgtggcctattctgtgctggtggtggccaaagtggaaaagggc
aagtccaaaaagctcaagagcgtgaaagagctgctggggatcaccatcatggaaagaagcagct
ttgagaagaacccgatcgactttctggaagccaagggctacaaagaagtcaagaaggacctcat
catcaagctccccaagtacagcctgttcgagctggaaaatggccggaagcggatgctggcctct
gctagagaactgcagaagggaaacgagctggccctgcctagcaaatatgtgaacttcctgtacc
tggccagccactatgagaagctgaagggcggatcttctggaagcgaaaccccaggcaccagcga
gtctgccacaccagaatcatctggcagcgaggtcgagttctctcacgaatattggatgagacac
gctctcaccctggctaagagagccagggacgaaagagaggtgccagttggcgctgtcctggtgt
tgaacaatcgcgtcatcggagaaggatggaatcgcgccattggcctgcacgatccaaccgcaca
tgccgaaattatggctctgcggcaaggcggcctcgtgatgcaaaattacagactgtacgatgct
accctctactccaccttcgagccctgtgtcatgtgtgctggggcaatgattcactcccggattg
gccgcgtggtgtttggagtgcggaatgccaagactggcgccgctggatctctgatggacgtcct
gcaccatcctgggatgaaccaccgggtcgagatcacagagggaattctggctgacgagtgcgct
gccctgctgtgcaggttctttagaatgcctagaagggtgttcaacgcccagaaaaaagctcaga
gcagcaccgatagccccgaggacaatgagcaaaagcagctgtttgtggaacagcacaagcacta
cctggacgagatcatcgagcagatcagcgagttctccaagagagtgatcctggccgacgctaac
ctggataaggtgctgtctgcctataacaagcaccgggacaagcctatcagagagcaggccgaga
atatcatccacctgtttaccctgaccaacctgggagcccctgccgccttcaagtacttcgacac
caccatcgaccggaagcagtaccggtccaccaaagaggtgctggacgccacactgatccaccag
tctatcaccggcctgtacgaaacccggatcgacctgtctcagctcggaggcgacgaaggcgccg
ataagagaaccgccgatggctctgagttcgagagccccaagaaaaagcgcaaagtgtaa
NGC_IBE11 amino acid sequence:
(SEQ ID NO: 639)
MDKKYSIGLAIGTNSVGWAVITDEYKVPSKKFKVLGNTDRHSIKKNLIGALLFDSGETAEATRL
KRTARRRYTRRKNRICYLQEIFSNEMAKVDDSFFHRLEESFLVEEDKKHERHPIFGNIVDEVAY
HEKYPTIYHLRKKLVDSTDKADLRLIYLALAHMIKFRGHFLIEGDLNPDNSDVDKLFIQLVQTY
NQLFEENPINASGVDAKAILSARLSKSRRLENLIAQLPGEKKNGLFGNLIALSLGLTPNFKSNF
DLAEDAKLQLSKDTYDDDLDNLLAQIGDQYADLFLAAKNLSDAILLSDILRVNTEITKAPLSAS
MVKRYDEHHQDLTLLKALVRQQLPEKYKEIFFDQSKNGYAGYIDGGASQEEFYKFIKPILEKMD
GTEELLVKLNREDLLRKQRTFDNGIIPHQIHLGELHAILRRQGDFYPFLKDNREKIEKILTFRI
PYYVGPLARGNSRFAWMTRKSEETITPWNFEEVVDKGASAQSFIERMTNFDKNLPNEKVLPKHS
LLYEYFTVYNELTKVKYVTEGMRKPAFLSGEQKKAIVDLLFKTNRKVTVKQLKEDYFKKIECFD
SVEISGVEDRFNASLGTYHDLLKIIKDKDFLDNEENEDILEDIVLTLTLFEDREMIEERLKTYA
HLFDDKVMKQLKRLRYTGWGRLSRKLINGIRDKQSGKTILDFLKSDGFANRNFMQLIHDDSLTF
KEDIQKAQVSGQGDSLHEHIANLAGSPAIKKGILQTVKVVDELVKVMGGHKPENIVIEMARENQ
TTQKGQKNSRERMKRIEEGIKELGSQILKEHPVENTQLQNEKLYLYYLQNGRDMYVDQELDINR
LSDYDVDHIVPQSFLKDDSIDNKVLTRSDKNRGKSDNVPSEEVVKKMKNYWRQLLNAKLITQRK
FDNLTKAERGGLSELDKAGFIKRQLVETRQITKHIVAQILDSRMNTKYDENDKLIREVKVITLKS
KLVSDFRKDFQFYKVREINNYHHAHDAYLNAVVGTALIKKYPKLESEFVYGDYKVYDVRKMIAK
SEGSSGSETPGTSESATPESSGSEVEFSHEYWMRHALTLAKRARDEREVPVGAVLVLNNRVIGE
GWNRAIGLHDPTAHAEIMALRQGGLVMQNYRLYDATLYSTFEPCVMCAGAMIHSRIGRVVFGVR
NAKTGAAGSLMDVLHHPGMNHRVEITEGILADECAALLCRFFRMPRRVFNAQKKAQSSTDQEIG
KATAKYFFYSNIMNFFKTEITLANGEIRKRPLIETNGETGEIVWDKGRDFATVRKVLSMPQVNI
VKKTEVQTGGFSKESILPKGNSDKLIARKKDWDPKKYGGFMQPTVAYSVLVVAKVEKGKSKKLK
SVKELLGITIMERSSFEKNPIDFLEAKGYKEVKKDLIIKLPKYSLFELENGRKRMLASAKFLQK
GNELALPSKYVNFLYLASHYEKLKGSPEDNEQKQLFVEQHKHYLDEIIEQISEFSKRVILADAN
LDKVLSAYNKHRDKPIREQAENIIHLFTLTNLGAPRAFKYFDTTIARKEYRSTKEVLDATLIHQ
SITGLYETRIDLSQLGGDEGADKRTADGSEFESPKKKRKV
NGC_IBE11 nucleotide sequence:
(SEQ ID NO: 640)
atggacaagaagtattctatcggactggccatcggcaccaactctgttggatgggccgtgatca
ccgacgagtacaaggtgcccagcaagaaattcaaggtgctgggcaacaccgacaggcacagcat
caagaagaacctgatcggcgcactgctgttcgactctggcgaaacagccgaggccaccagactg
aagagaacagcccgcagacggtacaccagaagaaagaaccggatctgctacctccaagagatct
tcagcaacgagatggccaaggtggacgacagcttcttccacagactggaagagtccttcctggt
ggaagaggacaagaagcacgagagacaccccatcttcggcaacatcgtggacgaggtggcctac
cacgagaagtaccccaccatctaccacctgagaaagaaactggtggacagcaccgacaaggccg
acctgagactgatctatctggccctggctcacatgatcaagttccggggccacttcctgatcga
gggcgacctgaatcctgacaacagcgacgtggacaagctgttcatccagctggtgcagacctac
aaccagctgttcgaggaaaaccccatcaacgccagcggagtggatgccaaggccatcctgtctg
ccagactgagcaagagcagacggctggaaaatctgatcgcccagctgcctggcgagaagaagaa
tggcctgttcggcaacctgattgccctgagcctgggcctgacacctaacttcaagagcaacttc
gacctggccgaggacgccaaactgcagctgagcaaggacacctacgacgacgacctggacaatc
tgctggcccagatcggcgatcagtacgccgacttgtttctggccgccaagaatctgagcgacgc
catcctgctgtccgacatcctgagagtgaacaccgagatcaccaaggcacctctgagcgcctct
atggtcaagagatacgacgagcaccaccaggatctgaccctgctgaaggccctcgttagacagc
agctgccagagaagtacaaagagattttcttcgaccagagcaagaacggctacgccggctacat
tgatggcggagccagccaagaggaattctacaagttcatcaagcccatcctcgagaagatggac
ggcaccgaggaactgctggtcaagctgaacagagaggacctgctgagaaagcagagaaccttcg
acaacggcatcatccctcaccagatccacctgggagaactgcacgccattctgcggagacaagg
ggacttttacccattcctgaaggacaaccgggaaaagatcgagaaaatcctgaccttcaggatc
ccctactacgtgggaccactggccagaggcaatagcagattcgcctggatgaccagaaagagcg
aggaaaccatcactccctggaacttcgaggaagtggtggacaagggcgccagcgctcagtcctt
catcgagcggatgaccaacttcgataagaacctgcctaacgagaaggtgctgcccaagcacagc
ctgctgtacgagtacttcaccgtgtacaacgagctgaccaaagtgaaatacgtgaccgagggaa
tgagaaagcccgcctttctgagcggcgagcagaaaaaggccatcgtggatctgctgttcaagac
caaccggaaagtgaccgtgaagcagctgaaagaggactacttcaagaaaatcgagtgcttcgac
agcgtcgagatctccggcgtggaagatcggttcaatgccagcctgggcacataccacgatctgc
tgaaaattatcaaggacaaggacttcctggacaacgaagagaacgaggacatccttgaggacat
cgtgctgacactgaccctgtttgaggacagagagatgatcgaggaacggctgaaaacatacgcc
cacctgttcgacgacaaagtgatgaagcaactgaagcggctgagatacaccggctggggcagac
tgtctcggaagctgatcaacggcatccgggataagcagtccggcaagaccatcctggactttct
gaagtccgacggcttcgccaacagaaacttcatgcagctgattcacgacgacagcctcaccttc
aaagaggatatccagaaagcccaggtgtccggccagggcgattctctgcatgagcacattgcca
acctggccggctctcccgccattaagaaaggcatcctgcagacagtgaaggtggtggacgagct
tgtgaaagtgatgggcggacacaagcccgagaacatcgtgatcgaaatggccagagagaaccag
accacacagaagggacagaagaacagccgcgagagaatgaagcggatcgaagagggcatcaaag
agctgggcagccagatcctgaaagaacaccccgtggaaaacacccagctgcagaacgagaagct
gtacctgtactacctgcagaatggacgggatatgtacgtggaccaagagctggacatcaacaga
ctgtccgactacgatgtggaccatatcgtgccccagtcttttctgaaggacgactccatcgaca
acaaggtcctgaccagatccgacaagaatcggggcaagagcgacaacgtgccctccgaagaggt
ggtcaagaagatgaagaactactggcgacagctgctgaacgccaagctgattacccagcggaag
ttcgacaatctgaccaaggccgaaagaggcggcctgagcgaactggataaggccggcttcatca
agagacagctggtggaaacccggcagatcacaaagcacgtggcacagattctggactctcggat
gaacactaagtacgacgagaacgacaaactgatccgcgaagtgaaagtcatcaccctgaagtcc
aagctggtgtccgatttccggaaggatttccagttctacaaagtgcgcgagatcaacaactacc
atcacgcccacgacgcctacctgaatgccgttgttggaacagccctgatcaaaaagtaccctaa
gctggaaagcgagttcgtgtacggcgactacaaggtgtacgacgtgcggaagatgatcgccaag
agcgagggatcttctggaagcgaaaccccaggcaccagcgagtctgccacaccagaatcatctg
gcagcgaggtcgagttctctcacgaatattggatgagacacgctctcaccctggctaagagagc
cagggacgaaagagaggtgccagttggcgctgtcctggtgttgaacaatcgcgtcatcggagaa
ggatggaatcgcgccattggcctgcacgatccaaccgcacatgccgaaattatggctctgcggc
aaggcggcctcgtgatgcaaaattacagactgtacgatgctaccctctactccaccttcgagcc
ctgtgtcatgtgtgctggggcaatgattcactcccggattggccgcgtggtgtttggagtgcgg
aatgccaagactggcgccgctggatctctgatggacgtcctgcaccatcctgggatgaaccacc
gggtcgagatcacagagggaattctggctgacgagtgcgctgccctgctgtgcaggttctttag
aatgcctagaagggtgttcaacgcccagaaaaaagctcagagcagcaccgatcaagagattggc
aaggcaaccgccaagtacttcttctacagcaacatcatgaactttttcaagacagagatcaccc
tcgccaacggcgagatcagaaagcggcctctgatcgagacaaacggcgaaaccggcgagattgt
gtgggataagggcagagactttgccacagtgcggaaagtgctgagcatgccccaagtgaatatc
gtgaagaaaaccgaggtgcagacaggcggcttcagcaaagagtctatcctgcctaaggggaact
ccgacaagctgatcgccagaaagaaggactgggaccccaagaaatacggcggctttatgcagcc
caccgtggcctattctgttctggtggtggccaaagtggaaaagggcaagtccaagaaactcaag
agcgtgaaagagctgctggggatcaccatcatggaaagaagcagcttcgagaagaatccgatcg
atttcctcgaggccaagggttacaaagaagtgaaaaaggacctgatcatcaagctccccaagta
ctccctgttcgagctggaaaacggccggaagagaatgctggcctctgccaagttcctgcagaag
ggaaacgaactggccctgcctagcaaatatgtgaacttcctgtacctggccagccactatgaga
agctgaagggcagccccgaggacaatgagcaaaagcagctgtttgtggaacagcacaagcacta
cctggacgagatcatcgagcagatcagcgagtttagcaagagagtgattctggccgacgccaat
ctggacaaagtgctgtccgcctacaacaagcaccgggacaagcctatcagagagcaggccgaga
atatcatccacctgtttaccctgaccaacctgggagcccctagagccttcaagtactttgacac
caccatcgcccggaaggagtaccggtccaccaaagaggtgctggacgccactctgatccaccag
tctatcaccggcctgtacgagacacggatcgacctgtctcaactcggaggcgacgaaggcgccg
ataagagaaccgccgatggctctgagttcgagagccccaagaaaaagcgcaaagtgtaa
NGC_IBE12 amino acid sequence:
(SEQ ID NO: 641)
MDKKYSIGLAIGTNSVGWAVITDEYKVPSKKFKVLGNTDRHSIKKNLIGALLFDSGETAEATRL
KRTARRRYTRRKNRICYLQEIFSNEMAKVDDSFFHRLEESFLVEEDKKHERHPIFGNIVDEVAY
HEKYPTIYHLRKKLVDSTDKADLRLIYLALAHMIKFRGHFLIEGDLNPDNSDVDKLFIQLVQTY
NQLFEENPINASGVDAKAILSARLSKSRRLENLIAQLPGEKKNGLFGNLIALSLGLTPNFKSNF
DLAEDAKLQLSKDTYDDDLDNLLAQIGDQYADLFLAAKNLSDAILLSDILRVNTEITKAPLSAS
MVKRYDEHHQDLTLLKALVRQQLPEKYKEIFFDQSKNGYAGYIDGGASQEEFYKFIKPILEKMD
GTEELLVKLNREDLLRKQRTFDNGIIPHQIHLGELHAILRRQGDFYPFLKDNREKIEKILTFRI
PYYVGPLARGNSRFAWMTRKSEETITPWNFEEVVDKGASAQSFIERMTNFDKNLPNEKVLPKHS
LLYEYFTVYNELTKVKYVTEGMRKPAFLSGEQKKAIVDLLFKTNRKVTVKQLKEDYFKKIECFD
SVEISGVEDRFNASLGTYHDLLKIIKDKDFLDNEENEDILEDIVLTLTLFEDREMIEERLKTYA
HLFDDKVMKQLKRLRYTGWGRLSRKLINGIRDKQSGKTILDFLKSDGFANRNFMQLIHDDSLTF
KEDIQKAQVSGQGDSLHEHIANLAGSPAIKKGILQTVKVVDELVKVMGGHKPENIVIEMARENQ
TTQKGQKNSRERMKRIEEGIKELGSQILKEHPVENTQLQNEKLYLYYLQNGRDMYVDQELDINR
LSDYDVDHIVPQSFLKDDSIDNKVLTRSDKNRGKSDNVPSEEVVKKMKNYWRQLLNAKLITQRK
FDNLTKAERGGLSELDKAGFIKRQLVETRQITKHIVAQILDSRMNTKYDENDKLIREVKVITLKS
KLVSDFRKDFQFYKVREINNYHHAHDAYLNAVVGTALIKKYPKLESEFVYGDYKVYDVRKMIAK
SEQEIGSSGSETPGTSESATPESSGSEVEFSHEYWMRHALTLAKRARDEREVPVGAVLVLNNRV
IGEGWNRAIGLHDPTAHAEIMALRQGGLVMQNYRLYDATLYSTFEPCVMCAGAMIHSRIGRVVF
GVRNAKTGAAGSLMDVLHHPGMNHRVEITEGILADECAALLCRFFRMPRRVFNAQKKAQSSTDG
KATAKYFFYSNIMNFFKTEITLANGEIRKRPLIETNGETGEIVWDKGRDFATVRKVLSMPQVNI
VKKTEVQTGGFSKESILPKGNSDKLIARKKDWDPKKYGGFMQPTVAYSVLVVAKVEKGKSKKLK
SVKELLGITIMERSSFEKNPIDFLEAKGYKEVKKDLIIKLPKYSLFELENGRKRMLASAKFLQK
GNELALPSKYVNFLYLASHYEKLKGSPEDNEQKQLFVEQHKHYLDEIIEQISEFSKRVILADAN
LDKVLSAYNKHRDKPIREQAENIIHLFTLTNLGAPRAFKYFDTTIARKEYRSTKEVLDATLIHQ
SITGLYETRIDLSQLGGDEGADKRTADGSEFESPKKKRKV
NGC_IBE12 nucleotide sequence:
(SEQ ID NO: 642)
atggacaagaagtattctatcggactggccatcggcaccaactctgttggatgggccgtgatca
ccgacgagtacaaggtgcccagcaagaaattcaaggtgctgggcaacaccgacaggcacagcat
caagaagaacctgatcggcgcactgctgttcgactctggcgaaacagccgaggccaccagactg
aagagaacagcccgcagacggtacaccagaagaaagaaccggatctgctacctccaagagatct
tcagcaacgagatggccaaggtggacgacagcttcttccacagactggaagagtccttcctggt
ggaagaggacaagaagcacgagagacaccccatcttcggcaacatcgtggacgaggtggcctac
cacgagaagtaccccaccatctaccacctgagaaagaaactggtggacagcaccgacaaggccg
acctgagactgatctatctggccctggctcacatgatcaagttccggggccacttcctgatcga
gggcgacctgaatcctgacaacagcgacgtggacaagctgttcatccagctggtgcagacctac
aaccagctgttcgaggaaaaccccatcaacgccagcggagtggatgccaaggccatcctgtctg
ccagactgagcaagagcagacggctggaaaatctgatcgcccagctgcctggcgagaagaagaa
tggcctgttcggcaacctgattgccctgagcctgggcctgacacctaacttcaagagcaacttc
gacctggccgaggacgccaaactgcagctgagcaaggacacctacgacgacgacctggacaatc
tgctggcccagatcggcgatcagtacgccgacttgtttctggccgccaagaatctgagcgacgc
catcctgctgtccgacatcctgagagtgaacaccgagatcaccaaggcacctctgagcgcctct
atggtcaagagatacgacgagcaccaccaggatctgaccctgctgaaggccctcgttagacagc
agctgccagagaagtacaaagagattttcttcgaccagagcaagaacggctacgccggctacat
tgatggcggagccagccaagaggaattctacaagttcatcaagcccatcctcgagaagatggac
ggcaccgaggaactgctggtcaagctgaacagagaggacctgctgagaaagcagagaaccttcg
acaacggcatcatccctcaccagatccacctgggagaactgcacgccattctgcggagacaagg
ggacttttacccattcctgaaggacaaccgggaaaagatcgagaaaatcctgaccttcaggatc
ccctactacgtgggaccactggccagaggcaatagcagattcgcctggatgaccagaaagagcg
aggaaaccatcactccctggaacttcgaggaagtggtggacaagggcgccagcgctcagtcctt
catcgagcggatgaccaacttcgataagaacctgcctaacgagaaggtgctgcccaagcacagc
ctgctgtacgagtacttcaccgtgtacaacgagctgaccaaagtgaaatacgtgaccgagggaa
tgagaaagcccgcctttctgagcggcgagcagaaaaaggccatcgtggatctgctgttcaagac
caaccggaaagtgaccgtgaagcagctgaaagaggactacttcaagaaaatcgagtgcttcgac
agcgtcgagatctccggcgtggaagatcggttcaatgccagcctgggcacataccacgatctgc
tgaaaattatcaaggacaaggacttcctggacaacgaagagaacgaggacatccttgaggacat
cgtgctgacactgaccctgtttgaggacagagagatgatcgaggaacggctgaaaacatacgcc
cacctgttcgacgacaaagtgatgaagcaactgaagcggctgagatacaccggctggggcagac
tgtctcggaagctgatcaacggcatccgggataagcagtccggcaagaccatcctggactttct
gaagtccgacggcttcgccaacagaaacttcatgcagctgattcacgacgacagcctcaccttc
aaagaggatatccagaaagcccaggtgtccggccagggcgattctctgcatgagcacattgcca
acctggccggctctcccgccattaagaaaggcatcctgcagacagtgaaggtggtggacgagct
tgtgaaagtgatgggcggacacaagcccgagaacatcgtgatcgaaatggccagagagaaccag
accacacagaagggacagaagaacagccgcgagagaatgaagcggatcgaagagggcatcaaag
agctgggcagccagatcctgaaagaacaccccgtggaaaacacccagctgcagaacgagaagct
gtacctgtactacctgcagaatggacgggatatgtacgtggaccaagagctggacatcaacaga
ctgtccgactacgatgtggaccatatcgtgccccagtcttttctgaaggacgactccatcgaca
acaaggtcctgaccagatccgacaagaatcggggcaagagcgacaacgtgccctccgaagaggt
ggtcaagaagatgaagaactactggcgacagctgctgaacgccaagctgattacccagcggaag
ttcgacaatctgaccaaggccgaaagaggcggcctgagcgaactggataaggccggcttcatca
agagacagctggtggaaacccggcagatcacaaagcacgtggcacagattctggactctcggat
gaacactaagtacgacgagaacgacaaactgatccgcgaagtgaaagtcatcaccctgaagtcc
aagctggtgtccgatttccggaaggatttccagttctacaaagtgcgcgagatcaacaactacc
atcacgcccacgacgcctacctgaatgccgttgttggaacagccctgatcaaaaagtaccctaa
gctggaaagcgagttcgtgtacggcgactacaaggtgtacgacgtgcggaagatgatcgccaag
agcgagcaagagattggatcttctggaagcgaaaccccaggcaccagcgagtctgccacaccag
aatcatctggcagcgaggtcgagttctctcacgaatattggatgagacacgctctcaccctggc
taagagagccagggacgaaagagaggtgccagttggcgctgtcctggtgttgaacaatcgcgtc
atcggagaaggatggaatcgcgccattggcctgcacgatccaaccgcacatgccgaaattatgg
ctctgcggcaaggcggcctcgtgatgcaaaattacagactgtacgatgctaccctctactccac
cttcgagccctgtgtcatgtgtgctggggcaatgattcactcccggattggccgcgtggtgttt
ggagtgcggaatgccaagactggcgccgctggatctctgatggacgtcctgcaccatcctggga
tgaaccaccgggtcgagatcacagagggaattctggctgacgagtgcgctgccctgctgtgcag
gttctttagaatgcctagaagggtgttcaacgcccagaaaaaagctcagagcagcaccgatggc
aaggcaaccgccaagtacttcttctacagcaacatcatgaactttttcaagacagagatcaccc
tcgccaacggcgagatcagaaagcggcctctgatcgagacaaacggcgaaaccggcgagattgt
gtgggataagggcagagactttgccacagtgcggaaagtgctgagcatgccccaagtgaatatc
gtgaagaaaaccgaggtgcagacaggcggcttcagcaaagagtctatcctgcctaaggggaact
ccgacaagctgatcgccagaaagaaggactgggaccccaagaaatacggcggctttatgcagcc
caccgtggcctattctgttctggtggtggccaaagtggaaaagggcaagtccaagaaactcaag
agcgtgaaagagctgctggggatcaccatcatggaaagaagcagcttcgagaagaatccgatcg
atttcctcgaggccaagggttacaaagaagtgaaaaaggacctgatcatcaagctccccaagta
ctccctgttcgagctggaaaacggccggaagagaatgctggcctctgccaagttcctgcagaag
ggaaacgaactggccctgcctagcaaatatgtgaacttcctgtacctggccagccactatgaga
agctgaagggcagccccgaggacaatgagcaaaagcagctgtttgtggaacagcacaagcacta
cctggacgagatcatcgagcagatcagcgagtttagcaagagagtgattctggccgacgccaat
ctggacaaagtgctgtccgcctacaacaagcaccgggacaagcctatcagagagcaggccgaga
atatcatccacctgtttaccctgaccaacctgggagcccctagagccttcaagtactttgacac
caccatcgcccggaaggagtaccggtccaccaaagaggtgctggacgccactctgatccaccag
tctatcaccggcctgtacgagacacggatcgacctgtctcaactcggaggcgacgaaggcgccg
ataagagaaccgccgatggctctgagttcgagagccccaagaaaaagcgcaaagtgtaa
NGC_IBE16 amino acid sequence:
(SEQ ID NO: 643)
MDKKYSIGLAIGTNSVGWAVITDEYKVPSKKFKVLGNTDRHSIKKNLIGALLFDSGETAEATRL
KRTARRRYTRRKNRICYLQEIFSNEMAKVDDSFFHRLEESFLVEEDKKHERHPIFGNIVDEVAY
HEKYPTIYHLRKKLVDSTDKADLRLIYLALAHMIKFRGHFLIEGDLNPDNSDVDKLFIQLVQTY
NQLFEENPINASGVDAKAILSARLSKSRRLENLIAQLPGEKKNGLFGNLIALSLGLTPNFKSNF
DLAEDAKLQLSKDTYDDDLDNLLAQIGDQYADLFLAAKNLSDAILLSDILRVNTEITKAPLSAS
MVKRYDEHHQDLTLLKALVRQQLPEKYKEIFFDQSKNGYAGYIDGGASQEEFYKFIKPILEKMD
GTEELLVKLNREDLLRKQRTFDNGIIPHQIHLGELHAILRRQGDFYPFLKDNREKIEKILTFRI
PYYVGPLARGNSRFAWMTRKSEETITPWNFEEVVDKGASAQSFIERMTNFDKNLPNEKVLPKHS
LLYEYFTVYNELTKVKYVTEGMRKPAFLSGEQKKAIVDLLFKTNRKVTVKQLKEDYFKKIECFD
SVEISGVEDRFNASLGTYHDLLKIIKDKDFLDNEENEDILEDIVLTLTLFEDREMIEERLKTYA
HLFDDKVMKQLKRLRYTGWGRLSRKLINGIRDKQSGKTILDFLKSDGFANRNFMQLIHDDSLTF
KEDIQKAQVSGQGDSLHEHIANLAGSPAIKKGILQTVKVVDELVKVMGGHKPENIVIEMARENQ
TTQKGQKNSRERMKRIEEGIKELGSQILKEHPVENTQLQNEKLYLYYLQNGRDMYVDQELDINR
LSDYDVDHIVPQSFLKDDSIDNKVLTRSDKNRGKSDNVPSEEVVKKMKNYWRQLLNAKLITQRK
FDNLTKAERGGLSELDKAGFIKRQLVETRQITKHVAQILDSRMNTKYDENDKLIREVKVITLKS
KLVSDFRKDFQFYKVREINNYHHAHDAYLNAVVGTALIKKYPKLESEFVYGDYKVYDVRKMIAK
SEQEIGKATAKYFFYSNIMNFFKTEITLANGEIRKRPLIETNGETGEIVWDKGRDFATVRKVLS
MPQVNIVKKTEVQTGGFSKESILPKGNSDKLIARKKDWDPKKYGGFMQPTVAYSVLVVAKVEKG
KSKKLKSVKELLGITIMERSSFEKNPIDFLEAKGYKEVKKDLIIKLPKYSLFELENGRKRMLAS
AKFLQKGNELALPSKYVNFLYLASHYEKLKGGSSGSETPGTSESATPESSGSEVEFSHEYWMRH
ALTLAKRARDEREVPVGAVLVLNNRVIGEGWNRAIGLHDPTAHAEIMALRQGGLVMQNYRLYDA
TLYSTFEPCVMCAGAMIHSRIGRVVFGVRNAKTGAAGSLMDVLHHPGMNHRVEITEGILADECA
ALLCRFFRMPRRVFNAQKKAQSSTDSPEDNEQKQLFVEQHKHYLDEIIEQISEFSKRVILADAN
LDKVLSAYNKHRDKPIREQAENIIHLFTLTNLGAPRAFKYFDTTIARKEYRSTKEVLDATLIHQ
SITGLYETRIDLSQLGGDEGADKRTADGSEFESPKKKRKV
NGC_IBE16 nucleotide sequence:
(SEQ ID NO: 644)
atggacaagaagtattctatcggactggccatcggcaccaactctgttggatgggccgtgatca
ccgacgagtacaaggtgcccagcaagaaattcaaggtgctgggcaacaccgacaggcacagcat
caagaagaacctgatcggcgcactgctgttcgactctggcgaaacagccgaggccaccagactg
aagagaacagcccgcagacggtacaccagaagaaagaaccggatctgctacctccaagagatct
tcagcaacgagatggccaaggtggacgacagcttcttccacagactggaagagtccttcctggt
ggaagaggacaagaagcacgagagacaccccatcttcggcaacatcgtggacgaggtggcctac
cacgagaagtaccccaccatctaccacctgagaaagaaactggtggacagcaccgacaaggccg
acctgagactgatctatctggccctggctcacatgatcaagttccggggccacttcctgatcga
gggcgacctgaatcctgacaacagcgacgtggacaagctgttcatccagctggtgcagacctac
aaccagctgttcgaggaaaaccccatcaacgccagcggagtggatgccaaggccatcctgtctg
ccagactgagcaagagcagacggctggaaaatctgatcgcccagctgcctggcgagaagaagaa
tggcctgttcggcaacctgattgccctgagcctgggcctgacacctaacttcaagagcaacttc
gacctggccgaggacgccaaactgcagctgagcaaggacacctacgacgacgacctggacaatc
tgctggcccagatcggcgatcagtacgccgacttgtttctggccgccaagaatctgagcgacgc
catcctgctgtccgacatcctgagagtgaacaccgagatcaccaaggcacctctgagcgcctct
atggtcaagagatacgacgagcaccaccaggatctgaccctgctgaaggccctcgttagacagc
agctgccagagaagtacaaagagattttcttcgaccagagcaagaacggctacgccggctacat
tgatggcggagccagccaagaggaattctacaagttcatcaagcccatcctcgagaagatggac
ggcaccgaggaactgctggtcaagctgaacagagaggacctgctgagaaagcagagaaccttcg
acaacggcatcatccctcaccagatccacctgggagaactgcacgccattctgcggagacaagg
ggacttttacccattcctgaaggacaaccgggaaaagatcgagaaaatcctgaccttcaggatc
ccctactacgtgggaccactggccagaggcaatagcagattcgcctggatgaccagaaagagcg
aggaaaccatcactccctggaacttcgaggaagtggtggacaagggcgccagcgctcagtcctt
catcgagcggatgaccaacttcgataagaacctgcctaacgagaaggtgctgcccaagcacagc
ctgctgtacgagtacttcaccgtgtacaacgagctgaccaaagtgaaatacgtgaccgagggaa
tgagaaagcccgcctttctgagcggcgagcagaaaaaggccatcgtggatctgctgttcaagac
caaccggaaagtgaccgtgaagcagctgaaagaggactacttcaagaaaatcgagtgcttcgac
agcgtcgagatctccggcgtggaagatcggttcaatgccagcctgggcacataccacgatctgc
tgaaaattatcaaggacaaggacttcctggacaacgaagagaacgaggacatccttgaggacat
cgtgctgacactgaccctgtttgaggacagagagatgatcgaggaacggctgaaaacatacgcc
cacctgttcgacgacaaagtgatgaagcaactgaagcggctgagatacaccggctggggcagac
tgtctcggaagctgatcaacggcatccgggataagcagtccggcaagaccatcctggactttct
gaagtccgacggcttcgccaacagaaacttcatgcagctgattcacgacgacagcctcaccttc
aaagaggatatccagaaagcccaggtgtccggccagggcgattctctgcatgagcacattgcca
acctggccggctctcccgccattaagaaaggcatcctgcagacagtgaaggtggtggacgagct
tgtgaaagtgatgggcggacacaagcccgagaacatcgtgatcgaaatggccagagagaaccag
accacacagaagggacagaagaacagccgcgagagaatgaagcggatcgaagagggcatcaaag
agctgggcagccagatcctgaaagaacaccccgtggaaaacacccagctgcagaacgagaagct
gtacctgtactacctgcagaatggacgggatatgtacgtggaccaagagctggacatcaacaga
ctgtccgactacgatgtggaccatatcgtgccccagtcttttctgaaggacgactccatcgaca
acaaggtcctgaccagatccgacaagaatcggggcaagagcgacaacgtgccctccgaagaggt
ggtcaagaagatgaagaactactggcgacagctgctgaacgccaagctgattacccagcggaag
ttcgacaatctgaccaaggccgaaagaggcggcctgagcgaactggataaggccggcttcatca
agagacagctggtggaaacccggcagatcacaaagcacgtggcacagattctggactctcggat
gaacactaagtacgacgagaacgacaaactgatccgcgaagtgaaagtcatcaccctgaagtcc
aagctggtgtccgatttccggaaggatttccagttctacaaagtgcgcgagatcaacaactacc
atcacgcccacgacgcctacctgaatgccgttgttggaacagccctgatcaaaaagtaccctaa
gctggaaagcgagttcgtgtacggcgactacaaggtgtacgacgtgcggaagatgatcgccaag
agcgagcaagagattggcaaggcaaccgccaagtacttcttctacagcaacatcatgaactttt
tcaagacagagatcaccctcgccaacggcgagatcagaaagcggcctctgatcgagacaaacgg
cgaaaccggcgagattgtgtgggataagggcagagactttgccacagtgcggaaagtgctgagc
atgccccaagtgaatatcgtgaagaaaaccgaggtgcagacaggcggcttcagcaaagagtcta
tcctgcctaaggggaactccgacaagctgatcgccagaaagaaggactgggaccccaagaaata
cggcggctttatgcagcccaccgtggcctattctgttctggtggtggccaaagtggaaaagggc
aagtccaagaaactcaagagcgtgaaagagctgctggggatcaccatcatggaaagaagcagct
tcgagaagaatccgatcgatttcctcgaggccaagggttacaaagaagtgaaaaaggacctgat
catcaagctccccaagtactccctgttcgagctggaaaacggccggaagagaatgctggcctct
gccaagttcctgcagaagggaaacgaactggccctgcctagcaaatatgtgaacttcctgtacc
tggccagccactatgagaagctgaagggcggatcttctggaagcgaaaccccaggcaccagcga
gtctgccacaccagaatcatctggcagcgaggtcgagttctctcacgaatattggatgagacac
gctctcaccctggctaagagagccagggacgaaagagaggtgccagttggcgctgtcctggtgt
tgaacaatcgcgtcatcggagaaggatggaatcgcgccattggcctgcacgatccaaccgcaca
tgccgaaattatggctctgcggcaaggcggcctcgtgatgcaaaattacagactgtacgatgct
accctctactccaccttcgagccctgtgtcatgtgtgctggggcaatgattcactcccggattg
gccgcgtggtgtttggagtgcggaatgccaagactggcgccgctggatctctgatggacgtcct
gcaccatcctgggatgaaccaccgggtcgagatcacagagggaattctggctgacgagtgcgct
gccctgctgtgcaggttctttagaatgcctagaagggtgttcaacgcccagaaaaaagctcaga
gcagcaccgatagccccgaggacaatgagcaaaagcagctgtttgtggaacagcacaagcacta
cctggacgagatcatcgagcagatcagcgagtttagcaagagagtgattctggccgacgccaat
ctggacaaagtgctgtccgcctacaacaagcaccgggacaagcctatcagagagcaggccgaga
atatcatccacctgtttaccctgaccaacctgggagcccctagagccttcaagtactttgacac
caccatcgcccggaaggagtaccggtccaccaaagaggtgctggacgccactctgatccaccag
tctatcaccggcctgtacgagacacggatcgacctgtctcaactcggaggcgacgaaggcgccg
ataagagaaccgccgatggctctgagttcgagagccccaagaaaaagcgcaaagtgtaa

[0300] A heterologous polypeptide (e.g., deaminase) can be inserted within a structural or functional domain of a Cas9 polypeptide. A heterologous polypeptide (e.g., deaminase) can be inserted between two structural or functional domains of a Cas9 polypeptide. A heterologous polypeptide (e.g., deaminase) can be inserted in place of a structural or functional domain of a Cas9 polypeptide, for example, after deleting the domain from the Cas9 polypeptide. The structural or functional domains of a Cas9 polypeptide can include, for example, RuvC I, RuvC II, RuvC III, Rec1, Rec2, PI, or HNH.

[0301] In some embodiments, the Cas9 polypeptide lacks one or more domains selected from the group consisting of RuvC I, RuvC II, RuvC III, Rec1, Rec2, PI, or HNH domain. In some embodiments, the Cas9 polypeptide lacks a nuclease domain. In some embodiments, the Cas9 polypeptide lacks an HNH domain. In some embodiments, the Cas9 polypeptide lacks a portion of the HNH domain such that the Cas9 polypeptide has reduced or abolished HNH activity. In some embodiments, the Cas9 polypeptide comprises a deletion of the nuclease domain, and the deaminase is inserted to replace the nuclease domain. In some embodiments, the HNH domain is deleted and the deaminase is inserted in its place. In some embodiments, one or more of the RuvC domains is deleted and the deaminase is inserted in its place.

[0302] A fusion protein comprising a heterologous polypeptide can be flanked by a N-terminal and a C-terminal fragment of a napDNAbp. In some embodiments, the fusion protein comprises a deaminase flanked by a N-terminal fragment and a C-terminal fragment of a Cas9 polypeptide. The N terminal fragment or the C terminal fragment can bind the target polynucleotide sequence. The C-terminus of the N terminal fragment or the N-terminus of the C terminal fragment can comprise a part of a flexible loop of a Cas9 polypeptide. The C-terminus of the N terminal fragment or the N-terminus of the C terminal fragment can comprise a part of an alpha-helix structure of the Cas9 polypeptide. The N-terminal fragment or the C-terminal fragment can comprise a DNA binding domain. The N-terminal fragment or the C-terminal fragment can comprise a RuvC domain. The N-terminal fragment or the C-terminal fragment can comprise an HNH domain. In some embodiments, neither of the N-terminal fragment and the C-terminal fragment comprises an HNH domain.

[0303] In some embodiments, the C-terminus of the N terminal Cas9 fragment comprises an amino acid that is in proximity to a target nucleobase when the fusion protein deaminates the target nucleobase. In some embodiments, the N-terminus of the C terminal Cas9 fragment comprises an amino acid that is in proximity to a target nucleobase when the fusion protein deaminates the target nucleobase. The insertion location of different deaminases can be different in order to have proximity between the target nucleobase and an amino acid in the C-terminus of the N terminal Cas9 fragment or the N-terminus of the C terminal Cas9 fragment. For example, the insertion position of an deaminase can be at an amino acid residue selected from the group consisting of 1015, 1022, 1029, 1040, 1068, 1247, 1054, 1026, 1027, 1030, 768, 1067, 1248, 1052, and 1246 as numbered in the above Cas9 reference sequence, or a corresponding amino acid residue in another Cas9 polypeptide.

[0304] The N-terminal Cas9 fragment of a fusion protein (i.e., the N-terminal Cas9 fragment flanking the deaminase in a fusion protein) can comprise the N-terminus of a Cas9 polypeptide. The N-terminal Cas9 fragment of a fusion protein can comprise a length of at least about: 100, 200, 300, 400, 500, 600, 700, 800, 900, 1000, 1100, 1200, or 1300 amino acids. The N-terminal Cas9 fragment of a fusion protein can comprise a sequence corresponding to amino acid residues: 1-56, 1-95, 1-200, 1-300, 1-400, 1-500, 1-600, 1-700, 1-718, 1-765, 1-780, 1-906, 1-918, or 1-1100 as numbered in the above Cas9 reference sequence, or a corresponding amino acid residue in another Cas9 polypeptide. The N-terminal Cas9 fragment can comprise a sequence comprising at least: 85%, at least 90%, at least 91%, at least 92%, at least 93%, at least 94%, at least 95%, at least 96%, at least 97%, at least 98%, at least 99%, or at least 99.5% sequence identity to amino acid residues: 1-56, 1-95, 1-200, 1-300, 1-400, 1-500, 1-600, 1-700, 1-718, 1-765, 1-780, 1-906, 1-918, or 1-1100 as numbered in the above Cas9 reference sequence, or a corresponding amino acid residue in another Cas9 polypeptide.

[0305] The C-terminal Cas9 fragment of a fusion protein (i.e., the C-terminal Cas9 fragment flanking the deaminase in a fusion protein) can comprise the C-terminus of a Cas9 polypeptide. The C-terminal Cas9 fragment of a fusion protein can comprise a length of at least about: 100, 200, 300, 400, 500, 600, 700, 800, 900, 1000, 1100, 1200, or 1300 amino acids. The C-terminal Cas9 fragment of a fusion protein can comprise a sequence corresponding to amino acid residues: 1099-1368, 918-1368, 906-1368, 780-1368, 765-1368, 718-1368, 94-1368, or 56-1368 as numbered in the above Cas9 reference sequence, or a corresponding amino acid residue in another Cas9 polypeptide. The N-terminal Cas9 fragment can comprise a sequence comprising at least: 85%, at least 90%, at least 91%, at least 92%, at least 93%, at least 94%, at least 95%, at least 96%, at least 97%, at least 98%, at least 99%, or at least 99.5% sequence identity to amino acid residues: 1099-1368, 918-1368, 906-1368, 780-1368, 765-1368, 718-1368, 94-1368, or 56-1368 as numbered in the above Cas9 reference sequence, or a corresponding amino acid residue in another Cas9 polypeptide.

[0306] The N-terminal Cas9 fragment and C-terminal Cas9 fragment of a fusion protein taken together may not correspond to a full-length naturally occurring Cas9 polypeptide sequence, for example, as set forth in the above Cas9 reference sequence.

[0307] The fusion protein or complex described herein can effect targeted deamination with reduced deamination at non-target sites (e.g., off-target sites), such as reduced genome wide spurious deamination. The fusion protein or complex described herein can effect targeted deamination with reduced bystander deamination at non-target sites. The undesired deamination or off-target deamination can be reduced by at least 30%, at least 40%, at least 50%, at least 60%, at least 70%, at least 80%, at least 90%, at least 95%, or at least 99% compared with, for example, an end terminus fusion protein comprising the deaminase fused to a N terminus or a C terminus of a Cas9 polypeptide. The undesired deamination or off-target deamination can be reduced by at least one-fold, at least two-fold, at least three-fold, at least four-fold, at least five-fold, at least tenfold, at least fifteen fold, at least twenty fold, at least thirty fold, at least forty fold, at least fifty fold, at least 60 fold, at least 70 fold, at least 80 fold, at least 90 fold, or at least hundred fold, compared with, for example, an end terminus fusion protein comprising the deaminase fused to a N terminus or a C terminus of a Cas9 polypeptide.

[0308] In some embodiments, the deaminase (e.g., adenosine deaminase, cytidine deaminase, or adenosine deaminase and cytidine deaminase) of the fusion protein or complex deaminates no more than two nucleobases within the range of an R-loop. In some embodiments, the deaminase of the fusion protein or complex deaminates no more than three nucleobases within the range of the R-loop. In some embodiments, the deaminase of the fusion protein or complex deaminates no more than 2, 3, 4, 5, 6, 7, 8, 9, or 10 nucleobases within the range of the R-loop. An R-loop is a three-stranded nucleic acid structure including a DNA:RNA hybrid, a DNA:DNA or an RNA: RNA complementary structure and the associated with single-stranded DNA. As used herein, an R-loop may be formed when a target polynucleotide is contacted with a CRISPR complex or a base editing complex, wherein a portion of a guide polynucleotide, e.g., a guide RNA, hybridizes with and displaces with a portion of a target polynucleotide, e.g., a target DNA. In some embodiments, an R-loop comprises a hybridized region of a spacer sequence and a target DNA complementary sequence. An R-loop region may be of about 5, 6, 7, 8, 9, 10, 11, 12, 13, 14, 15, 16, 17, 18, 19, 20, 21, 22, 23, 24, 25, 26, 27, 28, 29, 30, 31, 32, 33, 34, 35, 36, 37, 38, 39, 40, 41, 42, 43, 44, 45, 46, 47, 48, 49, or 50 nucleobase pairs in length. In some embodiments, the R-loop region is about 20 nucleobase pairs in length. It should be understood that, as used herein, an R-loop region is not limited to the target DNA strand that hybridizes with the guide polynucleotide. For example, editing of a target nucleobase within an R-loop region may be to a DNA strand that comprises the complementary strand to a guide RNA, or may be to a DNA strand that is the opposing strand of the strand complementary to the guide RNA. In some embodiments, editing in the region of the R-loop comprises editing a nucleobase on non-complementary strand (protospacer strand) to a guide RNA in a target DNA sequence.

[0309] The fusion protein or complex described herein can effect target deamination in an editing window different from canonical base editing. In some embodiments, a target nucleobase is from about 1 to about 20 bases upstream of a PAM sequence in the target polynucleotide sequence. In some embodiments, a target nucleobase is from about 2 to about 12 bases upstream of a PAM sequence in the target polynucleotide sequence. In some embodiments, a target nucleobase is from about 1 to 9 base pairs, about 2 to 10 base pairs, about 3 to 11 base pairs, about 4 to 12 base pairs, about 5 to 13 base pairs, about 6 to 14 base pairs, about 7 to 15 base pairs, about 8 to 16 base pairs, about 9 to 17 base pairs, about 10 to 18 base pairs, about 11 to 19 base pairs, about 12 to 20 base pairs, about 1 to 7 base pairs, about 2 to 8 base pairs, about 3 to 9 base pairs, about 4 to 10 base pairs, about 5 to 11 base pairs, about 6 to 12 base pairs, about 7 to 13 base pairs, about 8 to 14 base pairs, about 9 to 15 base pairs, about 10 to 16 base pairs, about 11 to 17 base pairs, about 12 to 18 base pairs, about 13 to 19 base pairs, about 14 to 20 base pairs, about 1 to 5 base pairs, about 2 to 6 base pairs, about 3 to 7 base pairs, about 4 to 8 base pairs, about 5 to 9 base pairs, about 6 to 10 base pairs, about 7 to 11 base pairs, about 8 to 12 base pairs, about 9 to 13 base pairs, about 10 to 14 base pairs, about 11 to 15 base pairs, about 12 to 16 base pairs, about 13 to 17 base pairs, about 14 to 18 base pairs, about 15 to 19 base pairs, about 16 to 20 base pairs, about 1 to 3 base pairs, about 2 to 4 base pairs, about 3 to 5 base pairs, about 4 to 6 base pairs, about 5 to 7 base pairs, about 6 to 8 base pairs, about 7 to 9 base pairs, about 8 to 10 base pairs, about 9 to 11 base pairs, about 10 to 12 base pairs, about 11 to 13 base pairs, about 12 to 14 base pairs, about 13 to 15 base pairs, about 14 to 16 base pairs, about 15 to 17 base pairs, about 16 to 18 base pairs, about 17 to 19 base pairs, about 18 to 20 base pairs away or upstream of the PAM sequence. In some embodiments, a target nucleobase is about 1, 2, 3, 4, 5, 6, 7, 8, 9, 10, 11, 12, 13, 14, 15, 16, 17, 18, 19, 20, or more base pairs away from or upstream of the PAM sequence. In some embodiments, a target nucleobase is about 1, 2, 3, 4, 5, 6, 7, 8, or 9 base pairs upstream of the PAM sequence. In some embodiments, a target nucleobase is about 2, 3, 4, or 6 base pairs upstream of the PAM sequence.

[0310] The fusion protein or complex can comprise more than one heterologous polypeptide. For example, the fusion protein or complex can additionally comprise one or more UGI domains and/or one or more nuclear localization signals. The two or more heterologous domains can be inserted in tandem. The two or more heterologous domains can be inserted at locations such that they are not in tandem in the NapDNAbp.

[0311] A fusion protein can comprise a linker between the deaminase and the napDNAbp polypeptide. The linker can be a peptide or a non-peptide linker. For example, the linker can be an XTEN, (GGGS)n (SEQ ID NO: 246), (GGGGS)n (SEQ ID NO: 247), (G)n, (EAAAK)n (SEQ ID NO: 248), (GGS)n, SGSETPGTSESATPES (SEQ ID NO: 249). In some embodiments, the fusion protein comprises a linker between the N-terminal Cas9 fragment and the deaminase. In some embodiments, the fusion protein comprises a linker between the C-terminal Cas9 fragment and the deaminase. In some embodiments, the N-terminal and C-terminal fragments of napDNAbp are connected to the deaminase with a linker. In some embodiments, the N-terminal and C-terminal fragments are joined to the deaminase domain without a linker. In some embodiments, the fusion protein comprises a linker between the N-terminal Cas9 fragment and the deaminase but does not comprise a linker between the C-terminal Cas9 fragment and the deaminase. In some embodiments, the fusion protein comprises a linker between the C-terminal Cas9 fragment and the deaminase but does not comprise a linker between the N-terminal Cas9 fragment and the deaminase.

[0312] In some embodiments, the napDNAbp in the fusion protein or complex is a Cas12 polypeptide, e.g., Cas12b/C2c1, or a fragment thereof capable of associating with a nucleic acid (e.g., a gRNA) that guides the Cas12 to a specific nucleic acid sequence. The Cas12 polypeptide can be a variant Cas12 polypeptide. In other embodiments, the N- or C-terminal fragments of the Cas12 polypeptide comprise a nucleic acid programmable DNA binding domain or a RuvC domain. In other embodiments, the fusion protein contains a linker between the Cas12 polypeptide and the catalytic domain. In other embodiments, the amino acid sequence of the linker is GGSGGS (SEQ ID NO: 250) or GSSGSETPGTSESATPESSG (SEQ ID NO: 251). In other embodiments, the linker is a rigid linker. In other embodiments of the above aspects, the linker is encoded by GGAGGCTCTGGAGGAAGC (SEQ ID NO: 252) or

(SEQ ID NO: 253)
GGCTCTTCTGGATCTGAAACACCTGGCACAAGCGAGAGCGCCACCCCTG
AGAGCTCTGGC.

[0313] Fusion proteins comprising a heterologous catalytic domain flanked by N- and C-terminal fragments of a Cas12 polypeptide are also useful for base editing in the methods as described herein. Fusion proteins comprising Cas12 and one or more deaminase domains, e.g., adenosine deaminase, or comprising an adenosine deaminase domain flanked by Cas12 sequences are also useful for highly specific and efficient base editing of target sequences. In an embodiment, a chimeric Cas12 fusion protein contains a heterologous catalytic domain (e.g., adenosine deaminase, cytidine deaminase, or adenosine deaminase and cytidine deaminase) inserted within a Cas12 polypeptide. In some embodiments, the fusion protein comprises an adenosine deaminase domain and a cytidine deaminase domain inserted within a Cas12. In some embodiments, an adenosine deaminase is fused within Cas12 and a cytidine deaminase is fused to the C-terminus. In some embodiments, an adenosine deaminase is fused within Cas12 and a cytidine deaminase fused to the N-terminus. In some embodiments, a cytidine deaminase is fused within Cas12 and an adenosine deaminase is fused to the C-terminus. In some embodiments, a cytidine deaminase is fused within Cas12 and an adenosine deaminase fused to the N-terminus. Exemplary structures of a fusion protein with an adenosine deaminase and a cytidine deaminase and a Cas12 are provided as follows:
[0314] NH₂-[Cas12(adenosine deaminase)]-[cytidine deaminase]-COOH;
[0315] NH₂-[cytidine deaminase]-[Cas12(adenosine deaminase)]-COOH;
[0316] NH₂-[Cas12(cytidine deaminase)]-[adenosine deaminase]-COOH; or
[0317] NH₂-[adenosine deaminase]-[Cas12(cytidine deaminase)]-COOH;

[0318] In some embodiments, the “−” used in the general architecture above indicates the optional presence of a linker.

[0319] In various embodiments, the catalytic domain has DNA modifying activity (e.g., deaminase activity), such as adenosine deaminase activity. In some embodiments, the adenosine deaminase is a TadA (e.g., TadA*7.10). In some embodiments, the TadA is a TadA*8. In some embodiments, a TadA*8 is fused within Cas12 and a cytidine deaminase is fused to the C-terminus. In some embodiments, a TadA*8 is fused within Cas12 and a cytidine deaminase fused to the N-terminus. In some embodiments, a cytidine deaminase is fused within Cas12 and a TadA*8 is fused to the C-terminus. In some embodiments, a cytidine deaminase is fused within Cas12 and a TadA*8 fused to the N-terminus. Exemplary structures of a fusion protein with a TadA*8 and a cytidine deaminase and a Cas12 are provided as follows:
[0320] N-[Cas12(TadA*8)]-[cytidine deaminase]-C;
[0321] N-[cytidine deaminase]-[Cas12(TadA*8)]-C;
[0322] N-[Cas12(cytidine deaminase)]-[TadA*8]-C; or
[0323] N-[TadA*8]-[Cas12(cytidine deaminase)]-C.

[0324] In some embodiments, the “−” used in the general architecture above indicates the optional presence of a linker.

[0325] In other embodiments, the fusion protein contains one or more catalytic domains. In other embodiments, at least one of the one or more catalytic domains is inserted within the Cas12 polypeptide or is fused at the Cas12 N-terminus or C-terminus. In other embodiments, at least one of the one or more catalytic domains is inserted within a loop, an alpha helix region, an unstructured portion, or a solvent accessible portion of the Cas12 polypeptide. In other embodiments, the Cas12 polypeptide is Cas12a, Cas12b, Cas12c, Cas12d, Cas12e, Cas12g, Cas12h, Cas12i, or Cas12j/CasΦ. In other embodiments, the Cas12 polypeptide has at least about 85% amino acid sequence identity to Bacillus hisashii Cas12b, Bacillus thermoamylovorans Cas12b, Bacillus sp. V3-13 Cas12b, or Alicyclobacillus acidiphilus Cas12b (SEQ ID NO: 254). In other embodiments, the Cas12 polypeptide has at least about 90% amino acid sequence identity to Bacillus hisashii Cas12b (SEQ ID NO: 255), Bacillus thermoamylovorans Cas12b, Bacillus sp. V3-13 Cas12b, or Alicyclobacillus acidiphilus Cas12b. In other embodiments, the Cas12 polypeptide has at least about 95% amino acid sequence identity to Bacillus hisashii Cas12b, Bacillus thermoamylovorans Cas12b (SEQ ID NO: 256), Bacillus sp. V3-13 Cas12b (SEQ ID NO: 257), or Alicyclobacillus acidiphilus Cas12b. In other embodiments, the Cas12 polypeptide contains or consists essentially of a fragment (e.g., a functional fragment) of Bacillus hisashii Cas12b, Bacillus thermoamylovorans Cas12b, Bacillus sp. V3-13 Cas12b, or Alicyclobacillus acidiphilus Cas12b. In embodiments, the Cas12 polypeptide contains BvCas12b (V4), which in some embodiments is expressed as 5′ mRNA Cap—5′ UTR—bhCas12b—STOP sequence—3′ UTR—120polyA tail (SEQ ID NOs: 258-260).

[0326] In other embodiments, the catalytic domain is inserted between amino acid positions 153-154, 255-256, 306-307, 980-981, 1019-1020, 534-535, 604-605, or 344-345 of BhCas12b or a corresponding amino acid residue of Cas12a, Cas12c, Cas12d, Cas12e, Cas12g, Cas12h, Cas12i, or Cas12j/Cas4. In other embodiments, the catalytic domain is inserted between amino acids P153 and S154 of BhCas12b. In other embodiments, the catalytic domain is inserted between amino acids K255 and E256 of BhCas12b. In other embodiments, the catalytic domain is inserted between amino acids D980 and G981 of BhCas12b. In other embodiments, the catalytic domain is inserted between amino acids K1019 and L1020 of BhCas12b. In other embodiments, the catalytic domain is inserted between amino acids F534 and P535 of BhCas12b. In other embodiments, the catalytic domain is inserted between amino acids K604 and G605 of BhCas12b. In other embodiments, the catalytic domain is inserted between amino acids H344 and F345 of BhCas12b. In other embodiments, catalytic domain is inserted between amino acid positions 147 and 148, 248 and 249, 299 and 300, 991 and 992, or 1031 and 1032 of BvCas12b or a corresponding amino acid residue of Cas12a, Cas12c, Cas12d, Cas12e, Cas12g, Cas12h, Cas12i, or Cas12j/Cas4. In other embodiments, the catalytic domain is inserted between amino acids P147 and D148 of BvCas12b. In other embodiments, the catalytic domain is inserted between amino acids G248 and G249 of BvCas12b. In other embodiments, the catalytic domain is inserted between amino acids P299 and E300 of BvCas12b. In other embodiments, the catalytic domain is inserted between amino acids G991 and E992 of BvCas12b. In other embodiments, the catalytic domain is inserted between amino acids K1031 and M1032 of BvCas12b. In other embodiments, the catalytic domain is inserted between amino acid positions 157 and 158, 258 and 259, 310 and 311, 1008 and 1009, or 1044 and 1045 of AaCas12b or a corresponding amino acid residue of Cas12a, Cas12c, Cas12d, Cas12e, Cas12g, Cas12h, Cas12i, or Cas12j/CasΦ. In other embodiments, the catalytic domain is inserted between amino acids P157 and G158 of AaCas12b. In other embodiments, the catalytic domain is inserted between amino acids V258 and G259 of AaCas12b. In other embodiments, the catalytic domain is inserted between amino acids D310 and P311 of AaCas12b. In other embodiments, the catalytic domain is inserted between amino acids G1008 and E1009 of AaCas12b. In other embodiments, the catalytic domain is inserted between amino acids G1044 and K1045 at of AaCas12b.

[0327] In other embodiments, the fusion protein or complex contains a nuclear localization signal (e.g., a bipartite nuclear localization signal). In other embodiments, the amino acid sequence of the nuclear localization signal is MAPKKKRKVGIHGVPAA (SEQ ID NO: 261). In other embodiments of the above aspects, the nuclear localization signal is encoded by the following sequence:
[0328] ATGGCCCCAAAGAAGAAGCGGAAGGTCGGTATCCACGGAGTCCCAGCAGCC (SEQ ID NO: 262). In other embodiments, the Cas12b polypeptide contains a mutation that silences the catalytic activity of a RuvC domain. In other embodiments, the Cas12b polypeptide contains D574A, D829A and/or D952A mutations. In other embodiments, the fusion protein or complex further contains a tag (e.g., an influenza hemagglutinin tag).

[0329] In some embodiments, the fusion protein or complex comprises a napDNAbp domain (e.g., Cas12-derived domain) with an internally fused nucleobase editing domain (e.g., all or a portion (e.g., a functional portion) of a deaminase domain, e.g., an adenosine deaminase domain). In some embodiments, the napDNAbp is a Cas12b. In some embodiments, the base editor comprises a BhCas12b domain with an internally fused TadA*8 domain inserted at the loci provided in Table 5 below.

TABLE 5
Insertion loci in Cas12b proteins

| | Insertion site | Inserted between aa |
|---|---|---|
| BhCas12b | | |
| position 1 | 153 | PS |
| position 2 | 255 | KE |
| position 3 | 306 | DE |
| position 4 | 980 | DG |
| position 5 | 1019 | KL |
| position 6 | 534 | FP |
| position 7 | 604 | KG |
| position 8 | 344 | HF |
| BvCas12b | | |
| position 1 | 147 | PD |
| position 2 | 248 | GG |
| position 3 | 299 | PE |
| position 4 | 991 | GE |
| position 5 | 1031 | KM |
| AaCas12b | | |
| position 1 | 157 | PG |
| position 2 | 258 | VG |
| position 3 | 310 | DP |
| position 4 | 1008 | GE |
| position 5 | 1044 | GK |

[0330] By way of nonlimiting example, an adenosine deaminase (e.g., TadA*8.13) may be inserted into a BhCas12b to produce a fusion protein (e.g., TadA*8.13-BhCas12b) that effectively edits a nucleic acid sequence.

[0331] In some embodiments, the base editing system described herein is an ABE with TadA inserted into a Cas9. Polypeptide sequences of relevant ABEs with TadA inserted into a Cas9 are provided in the attached Sequence Listing as SEQ ID NOs: 263-308.

[0332] In some embodiments, adenosine base editors were generated to insert TadA or variants thereof into the Cas9 polypeptide at the identified positions.

[0333] Exemplary, yet nonlimiting, fusion proteins are described in International PCT Application Nos. PCT/US2020/016285 and U.S. Provisional Application Nos. 62/852,228 and 62/852,224, the contents of which are incorporated by reference herein in their entireties.

### A to G Editing

[0334] In some embodiments, a base editor described herein comprises an adenosine deaminase domain. Such an adenosine deaminase domain of a base editor can facilitate the editing of an adenine (A) nucleobase to a guanine (G) nucleobase by deaminating the A to form inosine (I), which exhibits base pairing properties of G. Adenosine deaminase is capable of deaminating (i.e., removing an amine group) adenine of a deoxyadenosine residue in deoxyribonucleic acid (DNA). In some embodiments, an A-to-G base editor further comprises an inhibitor of inosine base excision repair, for example, a uracil glycosylase inhibitor (UGI) domain or a catalytically inactive inosine specific nuclease. Without wishing to be bound by any particular theory, the UGI domain or catalytically inactive inosine specific nuclease can inhibit or prevent base excision repair of a deaminated adenosine residue (e.g., inosine), which can improve the activity or efficiency of the base editor.

[0335] A base editor comprising an adenosine deaminase can act on any polynucleotide, including DNA, RNA and DNA-RNA hybrids. In certain embodiments, a base editor comprising an adenosine deaminase can deaminate a target A of a polynucleotide comprising RNA. For example, the base editor can comprise an adenosine deaminase domain capable of deaminating a target A of an RNA polynucleotide and/or a DNA-RNA hybrid polynucleotide. In an embodiment, an adenosine deaminase incorporated into a base editor comprises all or a portion (e.g., a functional portion) of adenosine deaminase acting on RNA (ADAR, e.g., ADAR1 or ADAR2) or tRNA (ADAT). A base editor comprising an adenosine deaminase domain can also be capable of deaminating an A nucleobase of a DNA polynucleotide. In an embodiment an adenosine deaminase domain of a base editor comprises all or a portion (e.g., a functional portion) of an ADAT comprising one or more mutations which permit the ADAT to deaminate a target A in DNA. For example, the base editor can comprise all or a portion (e.g., a functional portion) of an ADAT from Escherichia coli (EcTadA) comprising one or more of the following mutations: D108N, A106V, D147Y, E155V, L84F, H123Y, I156F, or a corresponding mutation in another adenosine deaminase. Exemplary ADAT homolog polypeptide sequences are provided in the Sequence Listing as SEQ ID NOs: 1 and 309-315.

[0336] The adenosine deaminase can be derived from any suitable organism (e.g., E. coli). In some embodiments, the adenosine deaminase is from a prokaryote. In some embodiments, the adenosine deaminase is from a bacterium. In some embodiments, the adenosine deaminase is from Escherichia coli, Staphylococcus aureus, Salmonella typhi, Shewanella putrefaciens, Haemophilus influenzae, Caulobacter crescentus, or Bacillus subtilis. In some embodiments, the adenosine deaminase is from E. coli. In some embodiments, the adenine deaminase is a naturally-occurring adenosine deaminase that includes one or more mutations corresponding to any of the mutations provided herein (e.g., mutations in ecTadA). The corresponding residue in any homologous protein can be identified by e.g., sequence alignment and determination of homologous residues. The mutations in any naturally-occurring adenosine deaminase (e.g., having homology to ecTadA) that correspond to any of the mutations described herein (e.g., any of the mutations identified in ecTadA) can be generated accordingly.

[0337] In some embodiments, the adenosine deaminase comprises an amino acid sequence that is at least 60%, at least 65%, at least 70%, at least 75%, at least 80%, at least 85%, at least 90%, at least 95%, at least 96%, at least 97%, at least 98%, at least 99%, or at least 99.5% identical to any one of the amino acid sequences set forth in any of the adenosine deaminases provided herein. It should be appreciated that adenosine deaminases provided herein may include one or more mutations (e.g., any of the mutations provided herein). The disclosure provides any deaminase domains with a certain percent identify plus any of the mutations or combinations thereof described herein. In some embodiments, the adenosine deaminase comprises an amino acid sequence that has 1, 2, 3, 4, 5, 6, 7, 8, 9, 10, 11, 12, 13, 14, 15, 16, 17, 18, 19, 20, 21, 22, 21, 24, 25, 26, 27, 28, 29, 30, 31, 32, 33, 34, 35, 36, 37, 38, 39, 40, 41, 42, 43, 44, 45, 46, 47, 48, 49, 50, or more mutations compared to a reference sequence, or any of the adenosine deaminases provided herein. In some embodiments, the adenosine deaminase comprises an amino acid sequence that has at least 5, at least 10, at least 15, at least 20, at least 25, at least 30, at least 35, at least 40, at least 45, at least 50, at least 60, at least 70, at least 80, at least 90, at least 100, at least 110, at least 120, at least 130, at least 140, at least 150, at least 160, or at least 170 identical contiguous amino acid residues as compared to any one of the amino acid sequences known in the art or described herein.

[0338] It should be appreciated that any of the mutations provided herein (e.g., based on a TadA reference sequence, such as TadA*7.10 (SEQ ID NO: 1)) can be introduced into other adenosine deaminases, such as E. coli TadA (ecTadA), S. aureus TadA (saTadA), or other adenosine deaminases (e.g., bacterial adenosine deaminases). In some embodiments, the TadA reference sequence is TadA*7.10 (SEQ ID NO: 1). It would be apparent to the skilled artisan that additional deaminases may similarly be aligned to identify homologous amino acid residues that can be mutated as provided herein. Thus, any of the mutations identified in a TadA reference sequence can be made in other adenosine deaminases (e.g., ecTada) that have homologous amino acid residues. It should also be appreciated that any of the mutations provided herein can be made individually or in any combination in a TadA reference sequence or another adenosine deaminase.

[0339] In some embodiments, the adenosine deaminase comprises a D108X mutation in a TadA reference sequence, or a corresponding mutation in another adenosine deaminase, where X indicates any amino acid other than the corresponding amino acid in the wild-type adenosine deaminase. In some embodiments, the adenosine deaminase comprises a D108G, D108N, D108V, D108A, or D108Y mutation in a TadA reference sequence, or a corresponding mutation in another adenosine deaminase. It should be appreciated, however, that additional deaminases may similarly be aligned to identify homologous amino acid residues that can be mutated as provided herein.

[0340] In some embodiments, the adenosine deaminase comprises an A106X mutation in a TadA reference sequence, or a corresponding mutation in another adenosine deaminase, where X indicates any amino acid other than the corresponding amino acid in the wild-type adenosine deaminase. In some embodiments, the adenosine deaminase comprises an A106V mutation in a TadA reference sequence, or a corresponding mutation in another adenosine deaminase (e.g. ecTadA).

[0341] In some embodiments, the adenosine deaminase comprises a E155X mutation in a TadA reference sequence, or a corresponding mutation in another adenosine deaminase, where the presence of X indicates any amino acid other than the corresponding amino acid in the wild-type adenosine deaminase. In some embodiments, the adenosine deaminase comprises a E155D, E155G, or E155V mutation in a TadA reference sequence, or a corresponding mutation in another adenosine deaminase (e.g., ecTadA).

[0342] In some embodiments, the adenosine deaminase comprises a D147X mutation in a TadA reference sequence, or a corresponding mutation in another adenosine deaminase, where the presence of X indicates any amino acid other than the corresponding amino acid in the wild-type adenosine deaminase. In some embodiments, the adenosine deaminase comprises a D147Y, mutation in a TadA reference sequence, or a corresponding mutation in another adenosine deaminase (e.g., ecTadA).

[0343] In some embodiments, the adenosine deaminase comprises an A106X, E155X, or D147X, mutation in a TadA reference sequence, or a corresponding mutation in another adenosine deaminase (e.g., ecTadA), where X indicates any amino acid other than the corresponding amino acid in the wild-type adenosine deaminase. In some embodiments, the adenosine deaminase comprises an E155D, E155G, or E155V mutation. In some embodiments, the adenosine deaminase comprises a D147Y.

[0344] It should also be appreciated that any of the mutations provided herein may be made individually or in any combination in ecTadA or another adenosine deaminase. For example, an adenosine deaminase may contain a D108N, a A106V, a E155V, and/or a D147Y mutation in a TadA reference sequence, or a corresponding mutation in another adenosine deaminase (e.g., ecTadA). In some embodiments, an adenosine deaminase comprises the following group of mutations (groups of mutations are separated by a “;”) in a TadA reference sequence (e.g., TadA*7.10 (SEQ ID NO: 1), or corresponding mutations in another adenosine deaminase: D108N and A106V; D108N and E155V; D108N and D147Y; A106V and E155V; A106V and D147Y; E155V and D147Y; D108N, A106V, and E155V; D108N, A106V, and D147Y; D108N, E155V, and D147Y; A106V, E155V, and D147Y; and D108N, A106V, E155V, and D147Y. It should be appreciated, however, that any combination of corresponding mutations provided herein may be made in an adenosine deaminase (e.g., ecTadA).

[0345] In some embodiments, the adenosine deaminase comprises a combination of mutations in a TadA reference sequence (e.g., TadA*7.10 (SEQ ID NO: 1)), or corresponding mutations in another adenosine deaminase: V82G+Y147T+Q154S; I76Y+V82G+Y147T+Q154S; L36H+V82G+Y147T+Q154S+N157K; V82G+Y147D+F149Y+Q154S+D167N; L36H+V82G+Y147D+F149Y+Q154S+N157K+D167N; L36H+I76Y+V82G+Y147T+Q154S+N157K; I76Y+V82G+Y147D+F149Y+Q154S+D167N; or L36H+I76Y+V82G+Y147D+F149Y+Q154S+N157K+D167N.

[0346] In some embodiments, the adenosine deaminase comprises one or more of a H8X, T17X, L18X, W23X, L34X, W45X, R51X, A56X, E59X, E85X, M94X, I95X, V102X, F104X, A106X, R107X, D108X, K110X, M118X, N127X, A138X, F149X, M151X, R153X, Q154X, I156X, and/or K157X mutation in a TadA reference sequence, or one or more corresponding mutations in another adenosine deaminase, where the presence of X indicates any amino acid other than the corresponding amino acid in the wild-type adenosine deaminase. In some embodiments, the adenosine deaminase comprises one or more of H8Y, T17S, L18E, W23L, L34S, W45L, R51H, A56E, or A56S, E59G, E85K, or E85G, M94L, I95L, V102A, F104L, A106V, R107C, or R107H, or R107P, D108G, or D108N, or D108V, or D108A, or D108Y, K110I, M118K, N127S, A138V, F149Y, M151V, R153C, Q154L, 1156D, and/or K157R mutation in a TadA reference sequence, or one or more corresponding mutations in another adenosine deaminase.

[0347] In some embodiments, the adenosine deaminase comprises one or more of a H8X, D108X, and/or N127X mutation in a TadA reference sequence, or one or more corresponding mutations in another adenosine deaminase, where X indicates the presence of any amino acid. In some embodiments, the adenosine deaminase comprises one or more of a H8Y, D108N, and/or N127S mutation in a TadA reference sequence, or one or more corresponding mutations in another adenosine deaminase.

[0348] In some embodiments, the adenosine deaminase comprises one or more of H8X, R26X, M61X, L68X, M70X, A106X, D108X, A109X, N127X, D147X, R152X, Q154X, E155X, K161X, Q163X, and/or T166X mutation in a TadA reference sequence, or one or more corresponding mutations in another adenosine deaminase, where X indicates the presence of any amino acid other than the corresponding amino acid in the wild-type adenosine deaminase. In some embodiments, the adenosine deaminase comprises one or more of H8Y, R26W, M61I, L68Q, M70V, A106T, D108N, A109T, N127S, D147Y, R152C, Q154H or Q154R, E155G or E155V or E155D, K161Q, Q163H, and/or T166P mutation in a TadA reference sequence, or one or more corresponding mutations in another adenosine deaminase.

[0349] In some embodiments, the adenosine deaminase comprises one, two, three, four, five, or six mutations selected from the group consisting of H8X, D108X, N127X, D147X, R152X, and Q154X in a TadA reference sequence, or a corresponding mutation or mutations in another adenosine deaminase (e.g., ecTadA), where X indicates the presence of any amino acid other than the corresponding amino acid in the wild-type adenosine deaminase. In some embodiments, the adenosine deaminase comprises one, two, three, four, five, six, seven, or eight mutations selected from the group consisting of H8X, M61X, M70X, D108X, N127X, Q154X, E155X, and Q163X a TadA reference sequence, or a corresponding mutation or mutations in another adenosine deaminase (e.g., ecTadA), where X indicates the presence of any amino acid other than the corresponding amino acid in the wild-type adenosine deaminase. In some embodiments, the adenosine deaminase comprises one, two, three, four, or five, mutations selected from the group consisting of H8X, D108X, N127X, E155X, and T166X in a TadA reference sequence, or a corresponding mutation or mutations in another adenosine deaminase (e.g., ecTadA), where X indicates the presence of any amino acid other than the corresponding amino acid in the wild-type adenosine deaminase.

[0350] In some embodiments, the adenosine deaminase comprises one, two, three, four, five, or six mutations selected from the group consisting of H8X, A106X, and D108X, or a corresponding mutation or mutations in another adenosine deaminase, where X indicates the presence of any amino acid other than the corresponding amino acid in the wild-type adenosine deaminase. In some embodiments, the adenosine deaminase comprises one, two, three, four, five, six, seven, or eight mutations selected from the group consisting of H8X, R26X, L68X, D108X, N127X, D147X, and E155X, or a corresponding mutation or mutations in another adenosine deaminase, where X indicates the presence of any amino acid other than the corresponding amino acid in the wild-type adenosine deaminase.

[0351] In some embodiments, the adenosine deaminase comprises one, two, three, four, five, six, or seven mutations selected from the group consisting of H8X, R126X, L68X, D108X, N127X, D147X, and E155X in a TadA reference sequence, or a corresponding mutation or mutations in another adenosine deaminase, where X indicates the presence of any amino acid other than the corresponding amino acid in the wild-type adenosine deaminase. In some embodiments, the adenosine deaminase comprises one, two, three, four, or five mutations selected from the group consisting of H8X, D108X, A109X, N127X, and E155X in a TadA reference sequence, or a corresponding mutation or mutations in another adenosine deaminase, where X indicates the presence of any amino acid other than the corresponding amino acid in the wild-type adenosine deaminase.

[0352] In some embodiments, the adenosine deaminase comprises one, two, three, four, five, or six mutations selected from the group consisting of H8Y, D108N, N127S, D147Y, R152C, and Q154H in a TadA reference sequence, or a corresponding mutation or mutations in another adenosine deaminase (e.g., ecTadA). In some embodiments, the adenosine deaminase comprises one, two, three, four, five, six, seven, or eight mutations selected from the group consisting of H8Y, M61I, M70V, D108N, N127S, Q154R, E155G and Q163H in a TadA reference sequence, or a corresponding mutation or mutations in another adenosine deaminase (e.g., ecTadA). In some embodiments, the adenosine deaminase comprises one, two, three, four, or five, mutations selected from the group consisting of H8Y, D108N, N127S, E155V, and T166P in a TadA reference sequence, or a corresponding mutation or mutations in another adenosine deaminase (e.g., ecTadA). In some embodiments, the adenosine deaminase comprises one, two, three, four, five, or six mutations selected from the group consisting of H8Y, A106T, D108N, N127S, E155D, and K161Q in a TadA reference sequence, or a corresponding mutation or mutations in another adenosine deaminase (e.g., ecTadA). In some embodiments, the adenosine deaminase comprises one, two, three, four, five, six, seven, or eight mutations selected from the group consisting of H8Y, R26W, L68Q, D108N, N127S, D147Y, and E155V in a TadA reference sequence, or a corresponding mutation or mutations in another adenosine deaminase (e.g. ecTadA). In some embodiments, the adenosine deaminase comprises one, two, three, four, or five, mutations selected from the group consisting of H8Y, D108N, A109T, N127S, and E155G in a TadA reference sequence, or a corresponding mutation or mutations in another adenosine deaminase (e.g., ecTadA).

[0353] In some embodiments, the adenosine deaminase comprises one or more of the or one or more corresponding mutations in another adenosine deaminase. In some embodiments, the adenosine deaminase comprises a D108N, D108G, or D108V mutation in a TadA reference sequence, or corresponding mutations in another adenosine deaminase. In some embodiments, the adenosine deaminase comprises a A106V and D108N mutation in a TadA reference sequence, or corresponding mutations in another adenosine deaminase. In some embodiments, the adenosine deaminase comprises R107C and D108N mutations in a TadA reference sequence, or corresponding mutations in another adenosine deaminase. In some embodiments, the adenosine deaminase comprises a H8Y, D108N, N127S, D147Y, and Q154H mutation in a TadA reference sequence, or corresponding mutations in another adenosine deaminase. In some embodiments, the adenosine deaminase comprises a H8Y, D108N, N127S, D147Y, and E155V mutation in a TadA reference sequence, or corresponding mutations in another adenosine deaminase. In some embodiments, the adenosine deaminase comprises a D108N, D147Y, and E155V mutation in a TadA reference sequence, or corresponding mutations in another adenosine deaminase. In some embodiments, the adenosine deaminase comprises a H8Y, D108N, and N127S mutation in a TadA reference sequence, or corresponding mutations in another adenosine deaminase. In some embodiments, the adenosine deaminase comprises a A106V, D108N, D147Y, and E155V mutation in a TadA reference sequence, or corresponding mutations in another adenosine deaminase (e.g., ecTadA).

[0354] In some embodiments, the adenosine deaminase comprises one or more of S2X, H8X, I49X, L84X, H123X, N127X, I156X, and/or K160X mutation in a TadA reference sequence, or one or more corresponding mutations in another adenosine deaminase, where the presence of X indicates any amino acid other than the corresponding amino acid in the wild-type adenosine deaminase. In some embodiments, the adenosine deaminase comprises one or more of S2A, H8Y, I49F, L84F, H123Y, N127S, I156F, and/or K160S mutation in a TadA reference sequence, or one or more corresponding mutations in another adenosine deaminase (e.g., ecTadA).

[0355] In some embodiments, the adenosine deaminase comprises an L84X mutation adenosine deaminase, where X indicates any amino acid other than the corresponding amino acid in the wild-type adenosine deaminase. In some embodiments, the adenosine deaminase comprises an L84F mutation in a TadA reference sequence, or a corresponding mutation in another adenosine deaminase (e.g., ecTadA).

[0356] In some embodiments, the adenosine deaminase comprises an H123X mutation in a TadA reference sequence, or a corresponding mutation in another adenosine deaminase, where X indicates any amino acid other than the corresponding amino acid in the wild-type adenosine deaminase. In some embodiments, the adenosine deaminase comprises an H123Y mutation in a TadA reference sequence, or a corresponding mutation in another adenosine deaminase.

[0357] In some embodiments, the adenosine deaminase comprises an I156X mutation in a TadA reference sequence, or a corresponding mutation in another adenosine deaminase, where X indicates any amino acid other than the corresponding amino acid in the wild-type adenosine deaminase. In some embodiments, the adenosine deaminase comprises an I156F mutation in a TadA reference sequence, or a corresponding mutation in another adenosine deaminase.

[0358] In some embodiments, the adenosine deaminase comprises one, two, three, four, five, six, or seven mutations selected from the group consisting of L84X, A106X, D108X, H123X, D147X, E155X, and I156X in a TadA reference sequence, or a corresponding mutation or mutations in another adenosine deaminase, where X indicates the presence of any amino acid other than the corresponding amino acid in the wild-type adenosine deaminase. In some embodiments, the adenosine deaminase comprises one, two, three, four, five, or six mutations selected from the group consisting of S2X, I49X, A106X, D108X, D147X, and E155X in a TadA reference sequence, or a corresponding mutation or mutations in another adenosine deaminase, where X indicates the presence of any amino acid other than the corresponding amino acid in the wild-type adenosine deaminase. In some embodiments, the adenosine deaminase comprises one, two, three, four, or five mutations selected from the group consisting of H8X, A106X, D108X, N127X, and K160X in a TadA reference sequence, or a corresponding mutation or mutations in another adenosine deaminase, where X indicates the presence of any amino acid other than the corresponding amino acid in the wild-type adenosine deaminase.

[0359] In some embodiments, the adenosine deaminase comprises one, two, three, four, five, six, or seven mutations selected from the group consisting of L84F, A106V, D108N, H123Y, D147Y, E155V, and I156F in a TadA reference sequence, or a corresponding mutation or mutations in another adenosine deaminase. In some embodiments, the adenosine deaminase comprises one, two, three, four, five, or six mutations selected from the group consisting of S2A, I49F, A106V, D108N, D147Y, and E155V in a TadA reference sequence.

[0360] In some embodiments, the adenosine deaminase comprises one, two, three, four, or five mutations selected from the group consisting of H8Y, A106T, D108N, N127S, and K160S in a TadA reference sequence, or a corresponding mutation or mutations in another adenosine deaminase.

[0361] In some embodiments, the adenosine deaminase comprises one or more of a E25X, R26X, R107X, A142X, and/or A143X mutation in a TadA reference sequence, or one or more corresponding mutations in another adenosine deaminase, where the presence of X indicates any amino acid other than the corresponding amino acid in the wild-type adenosine deaminase. In some embodiments, the adenosine deaminase comprises one or more of E25M, E25D, E25A, E25R, E25V, E25S, E25Y, R26G, R26N, R26Q, R26C, R26L, R26K, R107P, R107K, R107A, R107N, R107W, R107H, R107S, A142N, A142D, A142G, A143D, A143G, A143E, A143L, A143W, A143M, A143S, A143Q, and/or A143R mutation in a TadA reference sequence, or one or more corresponding mutations in another adenosine deaminase. In some embodiments, the adenosine deaminase comprises one or more of the mutations described herein corresponding to TadA reference sequence, or one or more corresponding mutations in another adenosine deaminase.

[0362] In some embodiments, the adenosine deaminase comprises an E25X mutation in a TadA reference sequence, or a corresponding mutation in another adenosine deaminase, where X indicates any amino acid other than the corresponding amino acid in the wild-type adenosine deaminase. In some embodiments, the adenosine deaminase comprises an E25M, E25D, E25A, E25R, E25V, E25S, or E25Y mutation in a TadA reference sequence, or a corresponding mutation in another adenosine deaminase (e.g., ecTadA).

[0363] In some embodiments, the adenosine deaminase comprises an R26X mutation in a TadA reference sequence, or a corresponding mutation in another adenosine deaminase, where X indicates any amino acid other than the corresponding amino acid in the wild-type adenosine deaminase. In some embodiments, the adenosine deaminase comprises R26G, R26N, R26Q, R26C, R26L, or R26K mutation in a TadA reference sequence, or a corresponding mutation in another adenosine deaminase (e.g., ecTadA).

[0364] In some embodiments, the adenosine deaminase comprises an R107X mutation in a TadA reference sequence, or a corresponding mutation in another adenosine deaminase, where X indicates any amino acid other than the corresponding amino acid in the wild-type adenosine deaminase. In some embodiments, the adenosine deaminase comprises an R107P, R107K, R107A, R107N, R107W, R107H, or R107S mutation in a TadA reference sequence, or a corresponding mutation in another adenosine deaminase (e.g., ecTadA).

[0365] In some embodiments, the adenosine deaminase comprises an A142X mutation in a TadA reference sequence, or a corresponding mutation in another adenosine deaminase, where X indicates any amino acid other than the corresponding amino acid in the wild-type adenosine deaminase. In some embodiments, the adenosine deaminase comprises an A142N, A142D, A142G, mutation in a TadA reference sequence, or a corresponding mutation in another adenosine deaminase (e.g., ecTadA).

[0366] In some embodiments, the adenosine deaminase comprises an A143X mutation in a TadA reference sequence, or a corresponding mutation in another adenosine deaminase, where X indicates any amino acid other than the corresponding amino acid in the wild-type adenosine deaminase. In some embodiments, the adenosine deaminase comprises an A143D, A143G, A143E, A143L, A143W, A143M, A143S, A143Q, and/or A143R mutation in a TadA reference sequence, or a corresponding mutation in another adenosine deaminase (e.g., ecTadA).

[0367] In some embodiments, the adenosine deaminase comprises one or more of a H36X, N37X, P48X, I49X, R51X, M70X, N72X, D77X, E134X, S146X, Q154X, K157X, and/or K161X mutation in a TadA reference sequence, or one or more corresponding mutations in another adenosine deaminase, where the presence of X indicates any amino acid other than the corresponding amino acid in the wild-type adenosine deaminase. In some embodiments, the adenosine deaminase comprises one or more of H36L, N37T, N37S, P48T, P48L, I49V, R51H, R51L, M70L, N72S, D77G, E134G, S146R, S146C, Q154H, K157N, and/or K161T mutation in a TadA reference sequence, or one or more corresponding mutations in another adenosine deaminase (e.g., ecTadA).

[0368] In some embodiments, the adenosine deaminase comprises an H36X mutation in a TadA reference sequence, or a corresponding mutation in another adenosine deaminase, where X indicates any amino acid other than the corresponding amino acid in the wild-type adenosine deaminase. In some embodiments, the adenosine deaminase comprises an H36L mutation in a TadA reference sequence, or a corresponding mutation in another adenosine deaminase.

[0369] In some embodiments, the adenosine deaminase comprises an N37X mutation in a TadA reference sequence, or a corresponding mutation in another adenosine deaminase, where X indicates any amino acid other than the corresponding amino acid in the wild-type adenosine deaminase. In some embodiments, the adenosine deaminase comprises an N37T or N37S mutation in a TadA reference sequence, or a corresponding mutation in another adenosine deaminase.

[0370] In some embodiments, the adenosine deaminase comprises an P48X mutation in a TadA reference sequence, or a corresponding mutation in another adenosine deaminase, where X indicates any amino acid other than the corresponding amino acid in the wild-type adenosine deaminase. In some embodiments, the adenosine deaminase comprises an P48T or P48L mutation in a TadA reference sequence, or a corresponding mutation in another adenosine deaminase.

[0371] In some embodiments, the adenosine deaminase comprises an R51X mutation in a TadA reference sequence, or a corresponding mutation in another adenosine deaminase, where X indicates any amino acid other than the corresponding amino acid in the wild-type adenosine deaminase. In some embodiments, the adenosine deaminase comprises an R51H or R51L mutation in a TadA reference sequence, or a corresponding mutation in another adenosine deaminase.

[0372] In some embodiments, the adenosine deaminase comprises an S146X mutation in a TadA reference sequence, or a corresponding mutation in another adenosine deaminase, where X indicates any amino acid other than the corresponding amino acid in the wild-type adenosine deaminase. In some embodiments, the adenosine deaminase comprises an S146R or S146C mutation in a TadA reference sequence, or a corresponding mutation in another adenosine deaminase.

[0373] In some embodiments, the adenosine deaminase comprises an K157X mutation in a TadA reference sequence, or a corresponding mutation in another adenosine deaminase, where X indicates any amino acid other than the corresponding amino acid in the wild-type adenosine deaminase. In some embodiments, the adenosine deaminase comprises a K157N mutation in a TadA reference sequence, or a corresponding mutation in another adenosine deaminase.

[0374] In some embodiments, the adenosine deaminase comprises an P48X mutation in a TadA reference sequence, or a corresponding mutation in another adenosine deaminase, where X indicates any amino acid other than the corresponding amino acid in the wild-type adenosine deaminase. In some embodiments, the adenosine deaminase comprises a P48S, P48T, or P48A mutation in a TadA reference sequence, or a corresponding mutation in another adenosine deaminase.

[0375] In some embodiments, the adenosine deaminase comprises an A142X mutation in a TadA reference sequence, or a corresponding mutation in another adenosine deaminase, where X indicates any amino acid other than the corresponding amino acid in the wild-type adenosine deaminase. In some embodiments, the adenosine deaminase comprises a A142N mutation in a TadA reference sequence, or a corresponding mutation in another adenosine deaminase.

[0376] In some embodiments, the adenosine deaminase comprises an W23X mutation in a TadA reference sequence, or a corresponding mutation in another adenosine deaminase, where X indicates any amino acid other than the corresponding amino acid in the wild-type adenosine deaminase. In some embodiments, the adenosine deaminase comprises a W23R or W23L mutation in a TadA reference sequence, or a corresponding mutation in another adenosine deaminase.

[0377] In some embodiments, the adenosine deaminase comprises an R152X mutation in a TadA reference sequence, or a corresponding mutation in another adenosine deaminase, where X indicates any amino acid other than the corresponding amino acid in the wild-type adenosine deaminase. In some embodiments, the adenosine deaminase comprises a R152P or R52H mutation in a TadA reference sequence, or a corresponding mutation in another adenosine deaminase.

[0378] In one embodiment, the adenosine deaminase may comprise the mutations H36L, R51L, L84F, A106V, D108N, H123Y, S146C, D147Y, E155V, I156F, and K157N. In some embodiments, the adenosine deaminase comprises the following combination of mutations relative to TadA reference sequence, where each mutation of a combination is separated by a “−” and each combination of mutations is between parentheses:
[0379] (A106V_D108N),
[0380] (R107C_D108N),
[0381] (H8Y_D108N_N127S_D147Y_Q154H),
[0382] (H8Y_D108N_N127S_D147Y_E155V),
[0383] (D108N_D147Y_E155V),
[0384] (H8Y_D108N_N127S),
[0385] (H8Y_D108N_N127S_D147Y_Q154H),
[0386] (A106V_D108N_D147Y_E155V),
[0387] (D108Q_D147Y_E155V),
[0388] (D108M_D147Y_E155V),
[0389] (D108L_D147Y_E155V),
[0390] (D108K_D147Y_E155V),
[0391] (D108I_D147Y_E155V),
[0392] (D108F_D147Y_E155V),
[0393] (A106V_D108N_D147Y),
[0394] (A106V_D108M_D147Y_E155V),
[0395] (E59A_A106V_D108N_D147Y_E155V),
[0396] (E59A cat dead_A106V_D108N_D147Y_E155V),
[0397] (L84F_A106V_D108N_H123Y_D147Y_E155V_I156Y),
[0398] (L84F_A106V_D108N_H123Y_D147Y_E155V_I156F),
[0399] (D103A_D104N),
[0400] (G22P_D103A_D104N),
[0401] (D103A_D104N_S138A),
[0402] (R26G_L84F_A106V_R107H_D108N_H123Y_A142N_A143D_D147Y_E155V_I156F),
[0403] (E25G_R26G_L84F_A106V_R107H_D108N_H123Y_A142N_A143D_D147Y_E155V_I156F),
[0404] (E25D_R26G_L84F_A106V_R107K_D108N_H123Y_A142N_A143G_D147Y_E155V_1156F), (R26Q_L84F_A106V_D108N_H123Y_A142N_D147Y_E155V_I156F),
[0405] (E25M_R26G_L84F_A106V_R107P_D108N_H123Y_A142N_A143D_D147Y_E155V_1156F), (R26C_L84F_A106V_R107H_D108N_H123Y_A142N_D147Y_E155V_1156F),
[0406] (L84F_A106V_D108N_H123Y_A142N_A143L_D147Y_E155V_I156F),
[0407] (R26G_L84F_A106V_D108N_H123Y_A142N_D147Y_E155V_I156F),
[0408] (E25A_R26G_L84F_A106V_R107N_D108N_H123Y_A142N_A143E_D147Y_E155V_I156F),
[0409] (R26G_L84F_A106V_R107H_D108N_H123Y_A142N_A143D_D147Y_E155V_I156F),
[0410] (A106V_D108N_A142N_D147Y_E155V),
[0411] (R26G_A106V_D108N_A142N_D147Y_E155V),
[0412] (E25D_R26G_A106V_R107K_D108N_A142N_A143G_D147Y_E155V),
[0413] (R26G_A106V_D108N_R107H_A142N_A143D_D147Y_E155V),
[0414] (E25D_R26G_A106V_D108N_A142N_D147Y_E155V),
[0415] (A106V_R107K_D108N_A142N_D147Y_E155V),
[0416] (A106V_D108N_A142N_A143G_D147Y_E155V),
[0417] (A106V_D108N_A142N_A143L_D147Y_E155V),
[0418] (H36L_R51L_L84F_A106V_D108N_H123Y_S146C_D147Y_E155V_I156F_K157N),
[0419] (N37T_P48T_M70L_L84F_A106V_D108N_H123Y_D147Y_I49V_E155V_I156F),
[0420] (N37S_L84F_A106V_D108N_H123Y_D147Y_E155V_I156F_K161T),
[0421] (H36L_L84F_A106V_D108N_H123Y_D147Y_Q154H_E155V_I156F),
[0422] (N72S_L84F_A106V_D108N_H123Y_S146R_D147Y_E155V_I156F),
[0423] (H36L_P48L_L84F_A106V_D108N_H123Y_E134G_D147Y_E155V_I156F),
[0424] (H36L_L84F_A106V_D108N_H123Y_D147Y_E155V_I156F_K157N)
[0425] (H36L_L84F_A106V_D108N_H123Y_S146C_D147Y_E155V_I156F),
[0426] (L84F_A106V_D108N_H123Y_S146R_D147Y_E155V_I156F_K161T),
[0427] (N37S_R51H_D77G_L84F_A106V_D108N_H123Y_D147Y_E155V_I156F),
[0428] (R51L_L84F_A106V_D108N_H123Y_D147Y_E155V_I156F_K157N),
[0429] (D24G_Q71R_L84F_H96L_A106V_D108N_H123Y_D147Y_E155V_I156F_K160E),
[0430] (H36L_G67V_L84F_A106V_D108N_H123Y_S146T_D147Y_E155V_I156F),
[0431] (Q71L_L84F_A106V_D108N_H123Y_L137M_A143E_D147Y_E155V_I156F),
[0432] (E25G_L84F_A106V_D108N_H123Y_D147Y_E155V_I156F_Q159L),
[0433] (L84F_A91T_F104I_A106V_D108N_H123Y_D147Y_E155V_I156F),
[0434] (N72D_L84F_A106V_D108N_H123Y_G125A_D147Y_E155V_I156F),
[0435] (P48S_L84F_S97C_A106V_D108N_H123Y_D147Y_E155V_I156F),
[0436] (W23G_L84F_A106V_D108N_H123Y_D147Y_E155V_I156F),
[0437] (D24G_P48L_Q71R_L84F_A106V_D108N_H123Y_D147Y_E155V_I156F_Q159L),
[0438] (L84F_A106V_D108N_H123Y_A142N_D147Y_E155V_I156F),
[0439] (H36L_R51L_L84F_A106V_D108N_H123Y_A142N_S146C_D147Y_E155V_I156F_K157N),
[0440] (N37S_L84F_A106V_D108N_H123Y_A142N_D147Y_E155V_I156F_K161T),
[0441] (L84F_A106V_D108N_D147Y_E155V_1156F),
[0442] (R51L_L84F_A106V_D108N_H123Y_S146C_D147Y_E155V_I156F_K157N_K161T),
[0443] (L84F_A106V_D108N_H123Y_S146C_D147Y_E155V_I156F_K161T),
[0444] (L84F_A106V_D108N_H123Y_S146C_D147Y_E155V_I156F_K157N_K160E_K161T),
[0445] (L84F_A106V_D108N_H123Y_S146C_D147Y_E155V_I156F_K157N_K160E),
[0446] (R74Q_L84F_A106V_D108N_H123Y_D147Y_E155V_I156F),
[0447] (R74A_L84F_A106V_D108N_H123Y_D147Y_E155V_I156F),
[0448] (L84F_A106V_D108N_H123Y_D147Y_E155V_I156F),
[0449] (R74Q_L84F_A106V_D108N_H123Y_D147Y_E155V_I156F),
[0450] (L84F_R98Q_A106V_D108N_H123Y_D147Y_E155V_I156F),
[0451] (L84F_A106V_D108N_H123Y_R129Q_D147Y_E155V_1156F),
[0452] (P48S_L84F_A106V_D108N_H123Y_A142N_D147Y_E155V_I156F),
[0453] (P48S_A142N),
[0454] (P48T_I49V_L84F_A106V_D108N_H123Y_A142N_D147Y_E155V_I156F_L157N),
[0455] (P48T_I49V_A142N),
[0456] (H36L_P48S_R51L_L84F_A106V_D108N_H123Y_S146C_D147Y_E155V_I156F_K157N),
[0457] (H36L_P48S_R51L_L84F_A106V_D108N_H123Y_S146C_A142N_D147Y_E155V_I156F
[0458] (H36L_P48T_I49V_R51L_L84F_A106V_D108N_H123Y_S146C_D147Y_E155V_I156F_K157N),
[0459] (H36L_P48T_I49V_R51L_L84F_A106V_D108N_H123Y_A142N_S146C_D147Y_E155V_I156F_K157N),
[0460] (H36L_P48A_R51L_L84F_A106V_D108N_H123Y_S146C_D147Y_E155V_I156F_K157N),
[0461] (H36L_P48A_R51L_L84F_A106V_D108N_H123Y_A142N_S146C_D147Y_E155V_I156F_K157N),
[0462] (H36L_P48A_R51L_L84F_A106V_D108N_H123Y_S146C_A142N_D147Y_E155V_I156F_K157N),
[0463] (W23L_H36L_P48A_R51L_L84F_A106V_D108N_H123Y_S146C_D147Y_E155V_I156F_K157N),
[0464] (W23R H36L_P48A_R51L_L84F_A106V_D108N_H123Y_S146C_D147Y_E155V_I156F_K157N),
[0465] (W23L_H36L_P48A_R51L_L84F_A106V_D108N_H123Y_S146R_D147Y_E155V_I156F_K161T),
[0466] (H36L_P48A_R51L_L84F_A106V_D108N_H123Y_S146C_D147Y_R152H_E155V_I156F_K157N),
[0467] (H36L_P48A_R51L_L84F_A106V_D108N_H123Y_S146C_D147Y_R152P_E155V_I156F_K157N),
[0468] (W23L_H36L_P48A_R51L_L84F_A106V_D108N_H123Y_S146C_D147Y_R152P_E155V_I156F_K157N),
[0469] (W23L_H36L_P48A_R51L_L84F_A106V_D108N_H123Y_A142A_S146C_D147Y_E155V_I 156F_K157N),
[0470] (W23L_H36L_P48A_R51L_L84F_A106V_D108N_H123Y_A142A_S146C_D147Y_R152P E155V_I156F_K157N),
[0471] (W23L_H36L_P48A_R51L_L84F_A106V_D108N_H123Y_S146R_D147Y_E155V_I156F_K161T),
[0472] (W23R H36L_P48A_R51L_L84F_A106V_D108N_H123Y_S146C_D147Y_R152P_E155V_I156F_K157N),
[0473] (H36L_P48A_R51L_L84F_A106V_D108N_H123Y_A142N_S146C_D147Y_R152P_E155V_I156F_K157N).

[0474] In some embodiments, the TadA deaminase is a TadA variant. In some embodiments, the TadA variant is TadA*7.10. In particular embodiments, the fusion proteins or complexes comprise a single TadA*7.10 domain (e.g., provided as a monomer). In other embodiments, the fusion protein comprises TadA*7.10 and TadA(wt), which are capable of forming heterodimers. In one embodiment, a fusion protein of the invention comprises a wild-type TadA linked to TadA*7.10, which is linked to Cas9 nickase.

[0475] In some embodiments, TadA*7.10 comprises at least one alteration. In some embodiments, the adenosine deaminase comprises an alteration in the following sequence:

TadA*7.10
(SEQ ID NO: 1)
MSEVEFSHEYWMRHALTLAKRARDEREVPVGAVLVLNNRVIGEGWNRAI
GLHDPTAHAEIMALRQGGLVMQNYRLIDATLYVTFEPCVMCAGAMIHSR
IGRVVFGVRNAKTGAAGSLMDVLHYPGMNHRVEITEGILADECAALLCY
FFRMPRQVFNAQKKAQSSTD

[0476] In some embodiments, TadA*7.10 comprises an alteration at amino acid 82 and/or 166. In particular embodiments, TadA*7.10 comprises one or more of the following alterations: Y147T, Y147R, Q154S, Y123H, V82S, T166R, and/or Q154R. In other embodiments, a variant of TadA*7.10 comprises a combination of alterations selected from the group of: Y147T+Q154R; Y147T+Q154S; Y147R+Q154S; V82S+Q154S; V82S+Y147R; V82S+Q154R; V82S+Y123H; I76Y+V82S; V82S+Y123H+Y147T; V82S+Y123H+Y147R; V82S+Y123H+Q154R; Y147R+Q154R+Y123H; Y147R+Q154R+176Y; Y147R+Q154R+T166R; Y123H+Y147R+Q154R+I76Y; V82S+Y123H+Y147R+Q154R; and I76Y+V82S+Y123H+Y147R+Q154R.

[0477] In some embodiments, a variant of TadA*7.10 comprises one or more of alterations selected from the group of L36H, I76Y, V82G, Y147T, Y147D, F149Y, Q154S, N157K, and/or D167N. In some embodiments, a variant of TadA*7.10 comprises V82G, Y147T/D, Q154S, and one or more of L36H, I76Y, F149Y, N157K, and D167N. In other embodiments, a variant of TadA*7.10 comprises a combination of alterations selected from the group of: V82G+Y147T+Q154S; I76Y+V82G+Y147T+Q154S; L36H+V82G+Y147T+Q154S+N157K; V82G+Y147D+F149Y+Q154S+D167N; L36H+V82G+Y147D+F149Y+Q154S+N157K+D167N; L36H+I76Y+V82G+Y147T+Q154S+N157K; I76Y+V82G+Y147D+F149Y+Q154S+D167N; L36H+I76Y+V82G+Y147D+F149Y+Q154S+N157K+D167N.

[0478] In some embodiments, an adenosine deaminase variant (e.g., TadA*8) comprises a deletion. In some embodiments, an adenosine deaminase variant comprises a deletion of the C terminus. In particular embodiments, an adenosine deaminase variant comprises a deletion of the C terminus beginning at residue 149, 150, 151, 152, 153, 154, 155, 156, and 157, relative to a TadA reference sequence (e.g., TadA*7.10 (SEQ ID NO: 1)), or a corresponding mutation in another TadA.

[0479] In other embodiments, an adenosine deaminase variant (e.g., TadA*8) is a monomer comprising one or more of the following alterations: Y147T, Y147R, Q154S, Y123H, V82S, T166R, and/or Q154R, relative to a TadA reference sequence (e.g., TadA*7.10 (SEQ ID NO: 1)), or a corresponding mutation in another TadA. In other embodiments, the adenosine deaminase variant (TadA*8) is a monomer comprising a combination of alterations selected from the group of: Y147T+Q154R; Y147T+Q154S; Y147R+Q154S; V82S+Q154S; V82S+Y147R; V82S+Q154R; V82S+Y123H; I76Y+V82S; V82S+Y123H+Y147T; V82S+Y123H+Y147R; V82S+Y123H+Q154R; Y147R+Q154R+Y123H; Y147R+Q154R+I76Y; Y147R+Q154R+T166R; Y123H+Y147R+Q154R+I76Y; V82S+Y123H+Y147R+Q154R; and I76Y+V82S+Y123H+Y147R+Q154R, relative to a TadA reference sequence (e.g., TadA*7.10 (SEQ ID NO: 1)), or a corresponding mutation in another TadA.

[0480] In other embodiments, the adenosine deaminase variant is a homodimer comprising two adenosine deaminase domains (e.g., TadA*8) each having one or more of the following alterations Y147T, Y147R, Q154S, Y123H, V82S, T166R, and/or Q154R, relative to a TadA reference sequence (e.g., TadA*7.10 (SEQ ID NO: 1)), or a corresponding mutation in another TadA. In other embodiments, the adenosine deaminase variant is a homodimer comprising two adenosine deaminase domains (e.g., TadA*8) each having a combination of alterations selected from the group of: Y147T+Q154R; Y147T+Q154S; Y147R+Q154S; V82S+Q154S; V82S+Y147R; V82S+Q154R; V82S+Y123H; I76Y+V82S; V82S+Y123H+Y147T; V82S+Y123H+Y147R; V82S+Y123H+Q154R; Y147R+Q154R+Y123H; Y147R+Q154R+I76Y; Y147R+Q154R+T166R; Y123H+Y147R+Q154R+I76Y; V82S+Y123H+Y147R+Q154R; and I76Y+V82S+Y123H+Y147R+Q154R, relative to a TadA reference sequence (e.g., TadA*7.10 (SEQ ID NO: 1)), or a corresponding mutation in another TadA.

[0481] In other embodiments, a base editor of the disclosure comprising an adenosine deaminase variant (e.g., TadA*8) monomer comprising one or more of the following alterations: R26C, V88A, A109S, T111R, D119N, H122N, Y147D, F149Y, T166I and/or D167N, relative to a TadA reference sequence (e.g., TadA*7.10 (SEQ ID NO: 1)), or a corresponding mutation in another TadA. In other embodiments, the adenosine deaminase variant (TadA*8) monomer comprises a combination of alterations selected from the group of: R26C+A109S+T111R+D119N+H122N+Y147D+F149Y+T166I+D167N; V88A+A109S+T111R+D119N+H122N+F149Y+T166I+D167N; R26C+A109S+T111R+D119N+H122N+F149Y+T166I+D167N; V88A+T111R+D119N+F149Y; and A109S+T111R+D119N+H122N+Y147D+F149Y+T166I+D167N, relative to a TadA reference sequence (e.g., TadA*7.10 (SEQ ID NO: 1)), or a corresponding mutation in another TadA.

[0482] In some embodiments, an adenosine deaminase variant (e.g., MSP828) is a monomer comprising one or more of the following alterations L36H, I76Y, V82G, Y147T, Y147D, F149Y, Q154S, N157K, and/or D167N, relative to a TadA reference sequence (e.g., TadA*7.10 (SEQ ID NO: 1)), or a corresponding mutation in another TadA. In some embodiments, an adenosine deaminase variant (e.g., MSP828) is a monomer comprising V82G, Y147T/D, Q154S, and one or more of L36H, 176Y, F149Y, N157K, and D167N, relative to a TadA reference sequence (e.g., TadA*7.10 (SEQ ID NO: 1)), or a corresponding mutation in another TadA. In other embodiments, the adenosine deaminase variant (TadA variant) is a monomer comprising a combination of alterations selected from the group of: V82G+Y147T+Q154S; 176Y+V82G+Y147T+Q154S; L36H+V82G+Y147T+Q154S+N157K; V82G+Y147D+F149Y+Q154S+D167N; L36H+V82G+Y147D+F149Y+Q154S+N157K+D167N; L36H+176Y+V82G+Y147T+Q154S+N157K; 176Y+V82G+Y147D+F149Y+Q154S+D167N; L36H+176Y+V82G+Y147D+F149Y+Q154S+N157K+D167N, relative to a TadA reference sequence (e.g., TadA*7.10 (SEQ ID NO: 1)), or a corresponding mutation in another TadA.

[0483] In other embodiments, the adenosine deaminase variant is a heterodimer of a wild-type adenosine deaminase domain and an adenosine deaminase variant domain (e.g., TadA*8) comprising one or more of the following alterations Y147T, Y147R, Q154S, Y123H, V82S, T166R, and/or Q154R, relative to a TadA reference sequence (e.g., TadA*7.10 (SEQ ID NO: 1)), or a corresponding mutation in another TadA. In other embodiments, the adenosine deaminase variant is a heterodimer of a wild-type adenosine deaminase domain and an adenosine deaminase variant domain (e.g., TadA*8) comprising a combination of alterations selected from the group of: Y147T+Q154R; Y147T+Q154S; Y147R+Q154S; V82S+Q154S; V82S+Y147R; V82S+Q154R; V82S+Y123H; 176Y+V82S; V82S+Y123H+Y147T; V82S+Y123H+Y147R; V82S+Y123H+Q154R; Y147R+Q154R+Y123H; Y147R+Q154R+176Y; Y147R+Q154R+T166R; Y123H+Y147R+Q154R+176Y; V82S+Y123H+Y147R+Q154R; and 176Y+V82S+Y123H+Y147R+Q154R, relative to a TadA reference sequence (e.g., TadA*7.10 (SEQ ID NO: 1)), or a corresponding mutation in another TadA.

[0484] In other embodiments, a base editor of the disclosure comprising an adenosine deaminase variant (e.g., TadA*8) homodimer comprising two adenosine deaminase domains (e.g., TadA*8) each having one or more of the following alterations R26C, V88A, A109S, T111R, D119N, H122N, Y147D, F149Y, T166I and/or D167N, relative to a TadA reference sequence (e.g., TadA*7.10 (SEQ ID NO: 1)), or a corresponding mutation in another TadA. In other embodiments, the adenosine deaminase variant is a homodimer comprising two adenosine deaminase domains (e.g., TadA*8) each having a combination of alterations selected from the group of: R26C+A109S+T111R+D119N+H122N+Y47D+F149Y+T166I+D167N; V88A+A109S+T111R+D119N+H122N+F149Y+T166I+D167N; R26C+A109S+T111R+D119N+H122N+F149Y+T166I+D167N; V88A+T111R+D119N+F149Y; and A109S+T11R+D119N+H122N+Y147D+F149Y+T166I+D167N, relative to a TadA reference sequence (e.g., TadA*7.10 (SEQ ID NO: 1)), or a corresponding mutation in another TadA.

[0485] In some embodiments, an adenosine deaminase variant is a homodimer comprising two adenosine deaminase domains (e.g., TadA*7.10) each having one or more of the following alterations L36H, I76Y, V82G, Y147T, Y147D, F149Y, Q154S, N157K, and/or D167N, relative to a TadA reference sequence (e.g., TadA*7.10 (SEQ ID NO: 1)), or a corresponding mutation in another TadA. In some embodiments, an adenosine deaminase variant is a homodimer comprising two adenosine deaminase variant domains (e.g., MSP828) each having the following alterations V82G, Y147T/D, Q154S, and one or more of L36H, I76Y, F149Y, N157K, and D167N, relative to a TadA reference sequence (e.g., TadA*7.10 (SEQ ID NO: 1)), or a corresponding mutation in another TadA. In other embodiments, the adenosine deaminase variant is a homodimer comprising two adenosine deaminase domains (e.g., TadA*7.10) each having a combination of alterations selected from the group of: V82G+Y147T+Q154S; I76Y+V82G+Y147T+Q154S; L36H+V82G+Y147T+Q154S+N157K; V82G+Y147D+F149Y+Q154S+D167N; L36H+V82G+Y147D+F149Y+Q154S+N157K+D167N; L36H+I76Y+V82G+Y147T+Q154S+N157K; I76Y+V82G+Y147D+F149Y+Q154S+D167N; L36H+I76Y+V82G+Y147D+F149Y+Q154S+N157K+D167N, relative to a TadA reference sequence (e.g., TadA*7.10 (SEQ ID NO: 1)), or a corresponding mutation in another TadA.

[0486] In other embodiments, the adenosine deaminase variant is a heterodimer of a TadA*7.10 domain and an adenosine deaminase variant domain (e.g., TadA*8) comprising one or more of the following alterations Y147T, Y147R, Q154S, Y123H, V82S, T166R, and/or Q154R, relative to a TadA reference sequence (e.g., TadA*7.10 (SEQ ID NO: 1)), or a corresponding mutation in another TadA. In other embodiments, the adenosine deaminase variant is a heterodimer of a TadA*7.10 domain and an adenosine deaminase variant domain (e.g., TadA*8) comprising a combination of alterations selected from the group of: Y147T+Q154R; Y147T+Q154S; Y147R+Q154S; V82S+Q154S; V82S+Y147R; V82S+Q154R; V82S+Y123H; I76Y+V82S; V82S+Y123H+Y147T; V82S+Y123H+Y147R; V82S+Y123H+Q154R; Y147R+Q154R+Y123H; Y147R+Q154R+176Y; Y147R+Q154R+T166R; Y123H+Y147R+Q154R+I76Y; V82S+Y123H+Y147R+Q154R; and I76Y+V82S+Y123H+Y147R+Q154R, relative to a TadA reference sequence (e.g., TadA*7.10 (SEQ ID NO: 1)), or a corresponding mutation in another TadA.

[0487] In other embodiments, a base editor comprises a heterodimer of a wild-type adenosine deaminase domain and an adenosine deaminase variant domain (e.g., TadA*8) comprising one or more of the following alterations R26C, V88A, A109S, T111R, D119N, H122N, Y147D, F149Y, T166I and/or D167N, relative to a TadA reference sequence (e.g., TadA*7.10 (SEQ ID NO: 1)), or a corresponding mutation in another TadA. In other embodiments, the base editor comprises a heterodimer of a wild-type adenosine deaminase domain and an adenosine deaminase variant domain (e.g., TadA*8) comprising a combination of alterations selected from the group of: R26C+A109S+T111R+D119N+H122N+Y147D+F149Y+T166I+D167N; V88A+A109S+T111R+D119N+H122N+F149Y+T166I+D167N; R26C+A109S+T111R+D119N+H122N+F149Y+T166I+D167N; V88A+T111R+D119N+F149Y; and A109S+T111R+D119N+H122N+Y147D+F149Y+T166I+D167N, relative to a TadA reference sequence (e.g., TadA*7.10 (SEQ ID NO: 1)), or a corresponding mutation in another TadA.

[0488] In other embodiments, the adenosine deaminase variant is a heterodimer of a wild-type adenosine deaminase domain and an adenosine deaminase variant domain (e.g., TadA*7.10) comprising one or more of the following alterations L36H, 176Y, V82G, Y147T, Y147D, F149Y, Q154S, N157K, and/or D167N, relative to a TadA reference sequence (e.g., TadA*7.10 (SEQ ID NO: 1)), or a corresponding mutation in another TadA. In some embodiments, an adenosine deaminase variant is a heterodimer comprising a wild-type adenosine deaminase domain and an adenosine deaminase variant domain (e.g., MSP828) having the following alterations V82G, Y147T/D, Q154S, and one or more of L36H, 176Y, F149Y, N157K, and D167N, relative to a TadA reference sequence (e.g., TadA*7.10 (SEQ ID NO: 1)), or a corresponding mutation in another TadA. In other embodiments, the adenosine deaminase variant is a heterodimer of a wild-type adenosine deaminase domain and an adenosine deaminase variant domain (e.g., TadA*7.10) comprising a combination of alterations selected from the group of: V82G+Y147T+Q154S; 176Y+V82G+Y147T+Q154S; L36H+V82G+Y147T+Q154S+N157K; V82G+Y147D+F149Y+Q154S+D167N; L36H+V82G+Y147D+F149Y+Q154S+N157K+D167N; L36H+176Y+V82G+Y147T+Q154S+N157K; 176Y+V82G+Y147D+F149Y+Q154S+D167N; L36H+176Y+V82G+Y147D+F149Y+Q154S+N157K+D167N, relative to a TadA reference sequence (e.g., TadA*7.10 (SEQ ID NO: 1)), or a corresponding mutation in another TadA.

[0489] In other embodiments, the adenosine deaminase variant is a heterodimer of a TadA*7.10 domain and an adenosine deaminase variant domain (e.g., TadA*8) comprising one or more of the following alterations Y147T, Y147R, Q154S, Y123H, V82S, T166R, and/or Q154R, relative to a TadA reference sequence (e.g., TadA*7.10 (SEQ ID NO: 1)), or a corresponding mutation in another TadA. In other embodiments, the adenosine deaminase variant is a heterodimer of a TadA*7.10 domain and an adenosine deaminase variant domain (e.g., TadA*8) comprising a combination of alterations selected from the group of: Y147T+Q154R; Y147T+Q154S; Y147R+Q154S; V82S+Q154S; V82S+Y147R; V82S+Q154R; V82S+Y123H; I76Y+V82S; V82S+Y123H+Y147T; V82S+Y123H+Y147R; V82S+Y123H+Q154R; Y147R+Q154R+Y123H; Y147R+Q154R+176Y; Y147R+Q154R+T166R; Y123H+Y147R+Q154R+I76Y; V82S+Y123H+Y147R+Q154R; and I76Y+V82S+Y123H+Y147R+Q154R, relative to a TadA reference sequence (e.g., TadA*7.10 (SEQ ID NO: 1)), or a corresponding mutation in another TadA.

[0490] In particular embodiments, an adenosine deaminase heterodimer comprises a TadA*8 domain and an adenosine deaminase domain selected from Staphylococcus aureus (S. aureus) TadA, Bacillus subtilis (B. subtilis) TadA, Salmonella typhimurium (S. typhimurium) TadA, Shewanella putrefaciens (S. putrefaciens) TadA, Haemophilus influenzae F3031 (H. influenzae) TadA, Caulobacter crescentus (C. crescentus) TadA, Geobacter sulfurreducens (G. sulfurreducens) TadA, or TadA*7.10.

[0491] In some embodiments, an adenosine deaminase is a TadA*8. In one embodiment, an adenosine deaminase is a TadA*8 that comprises or consists essentially of the following sequence or a fragment thereof having adenosine deaminase activity:

(SEQ ID NO: 316)
MSEVEFSHEYWMRHALTLAKRARDEREVPVGAVLVLNNRVIGEGWNRAI
GLHDPTAHAEIMALRQGGLVMQNYRLIDATLYVTFEPCVMCAGAMIHSR
IGRVVFGVRNAKTGAAGSLMDVLHYPGMNHRVEITEGILADECAALLCT
FFRMPRQVFNAQKKAQSSTD

[0492] In some embodiments, the TadA*8 is truncated. In some embodiments, the truncated TadA*8 is missing 1, 2, 3, 4, 5, 6, 7, 8, 9, 10, 11, 12, 13, 14, 15, 6, 17, 18, 19, or 20 N-terminal amino acid residues relative to the full length TadA*8. In some embodiments, the truncated TadA*8 is missing 1, 2, 3, 4, 5, 6, 7, 8, 9, 10, 11, 12, 13, 14, 15, 6, 17, 18, 19, or 20 C-terminal amino acid residues relative to the full length TadA*8. In some embodiments the adenosine deaminase variant is a full-length TadA*8.

[0493] In some embodiments the TadA*8 is TadA*8.1, TadA*8.2, TadA*8.3, TadA*8.4, TadA*8.5, TadA*8.6, TadA*8.7, TadA*8.8, TadA*8.9, TadA*8.10, TadA*8.11, TadA*8.12, TadA*8.13, TadA*8.14, TadA*8.15, TadA*8.16, TadA*8.17, TadA*8.18, TadA*8.19, TadA*8.20, TadA*8.21, TadA*8.22, TadA*8.23, or TadA*8.24.

[0494] In other embodiments, a base editor of the disclosure comprising an adenosine deaminase variant (e.g., TadA*8) monomer comprising one or more of the following alterations: R26C, V88A, A109S, T111R, D119N, H122N, Y147D, F149Y, T166I and/or D167N, relative to a TadA reference sequence (e.g., TadA*7.10 (SEQ ID NO: 1)), or a corresponding mutation in another TadA. In other embodiments, the adenosine deaminase variant (TadA*8) monomer comprises a combination of alterations selected from the group of: R26C+A109S+T111R+D119N+H122N+Y147D+F149Y+T166I+D167N; V88A+A109S+T111R+D119N+H122N+F149Y+T166I+D167N; R26C+A109S+T111R+D119N+H122N+F149Y+T166I+D167N; V88A+T111R+D119N+F149Y; and A109S+T111R+D119N+H122N+Y147D+F149Y+T166I+D167N, relative to a TadA reference sequence (e.g., TadA*7.10 (SEQ ID NO: 1)), or a corresponding mutation in another TadA.

[0495] In other embodiments, a base editor comprises a heterodimer of a wild-type adenosine deaminase domain and an adenosine deaminase variant domain (e.g., TadA*8) comprising one or more of the following alterations R26C, V88A, A109S, T111R, D119N, H122N, Y147D, F149Y, T166I and/or D167N, relative to a TadA reference sequence (e.g., TadA*7.10 (SEQ ID NO: 1)), or a corresponding mutation in another TadA. In other embodiments, the base editor comprises a heterodimer of a wild-type adenosine deaminase domain and an adenosine deaminase variant domain (e.g., TadA*8) comprising a combination of alterations selected from the group of: R26C+A109S+T111R+D119N+H122N+Y147D+F149Y+T166I+D167N; V88A+A109S+T111R+D119N+H122N+F149Y+T166I+D167N; R26C+A109S+T111R+D119N+H122N+F149Y+T166I+D167N; V88A+T111R+D119N+F149Y; and A109S+T111R+D119N+H122N+Y147D+F149Y+T166I+D167N, relative to a TadA reference sequence (e.g., TadA*7.10 (SEQ ID NO: 1)), or a corresponding mutation in another TadA.

[0496] In other embodiments, a base editor comprises a heterodimer of a TadA*7.10 domain and an adenosine deaminase variant domain (e.g., TadA*8) comprising one or more of the following alterations R26C, V88A, A109S, T111R, D119N, H122N, Y147D, F149Y, T166I and/or D167N, relative to a TadA reference sequence (e.g., TadA*7.10 (SEQ ID NO: 1)), or a corresponding mutation in another TadA. In other embodiments, the base editor comprises a heterodimer of a TadA*7.10 domain and an adenosine deaminase variant domain (e.g., TadA*8) comprising a combination of alterations selected from the group of: R26C+A109S+T111R+D119N+H122N+Y147D+F149Y+T166I+D167N; V88A+A109S+T111R+D119N+H122N+F149Y+T166I+D167N; R26C+A109S+T111R+D119N+H122N+F149Y+T166I+D167N; V88A+T111R+D119N+F149Y; and A109S+T111R+D119N+H122N+Y147D+F149Y+T166I+D167N, relative to a TadA reference sequence (e.g., TadA*7.10 (SEQ ID NO: 1)), or a corresponding mutation in another TadA.

[0497] In other embodiments, the adenosine deaminase variant is a heterodimer of a TadA*7.10 domain and an adenosine deaminase variant domain (e.g., TadA*7.10) comprising one or more of the following alterations L36H, 176Y, V82G, Y147T, Y147D, F149Y, Q154S, N157K, and/or D167N, relative to a TadA reference sequence (e.g., TadA*7.10 (SEQ ID NO: 1)), or a corresponding mutation in another TadA. In some embodiments, an adenosine deaminase variant is a heterodimer comprising a TadA*7.10 domain and an adenosine deaminase variant domain (e.g., MSP828) having the following alterations V82G, Y147T/D, Q154S, and one or more of L36H, 176Y, F149Y, N157K, and D167N, relative to a TadA reference sequence (e.g., TadA*7.10 (SEQ ID NO: 1)), or a corresponding mutation in another TadA. In other embodiments, the adenosine deaminase variant is a heterodimer of a TadA*7.10 domain and an adenosine deaminase variant domain (e.g., TadA*7.10) comprising a combination of alterations selected from the group of: V82G+Y147T+Q154S; 176Y+V82G+Y147T+Q154S; L36H+V82G+Y147T+Q154S+N157K; V82G+Y147D+F149Y+Q154S+D167N; L36H+V82G+Y147D+F149Y+Q154S+N157K+D167N; L36H+176Y+V82G+Y147T+Q154S+N157K; 176Y+V82G+Y147D+F149Y+Q154S+D167N; L36H+176Y+V82G+Y147D+F149Y+Q154S+N157K+D167N, relative to a TadA reference sequence (e.g., TadA*7.10 (SEQ ID NO: 1)), or a corresponding mutation in another TadA.

[0498] In some embodiments, the TadA*8 is a variant as shown in Table 6. Table 6 shows certain amino acid position numbers in the TadA amino acid sequence and the amino acids present in those positions in the TadA-7.10 adenosine deaminase. Table 6 also shows amino acid changes in TadA variants relative to TadA-7.10 following phage-assisted non-continuous evolution (PANCE) and phage-assisted continuous evolution (PACE), as described in M. Richter et al., 2020, Nature Biotechnology, doi.org/10.1038/s41587-020-0453-z, the entire contents of which are incorporated by reference herein. In some embodiments, the TadA*8 is TadA*8a, TadA*8b, TadA*8c, TadA*8d, or TadA*8e. In some embodiments, the TadA*8 is TadA*8e.

TABLE 6
Select TadA*8 Variants

| | | TadA amino acid number | | | | | | | | | |
|---|---|---|---|---|---|---|---|---|---|---|---|
| | TadA | 26 | 88 | 109 | 111 | 119 | 122 | 147 | 149 | 166 | 167 |
| | TadA-7.10 | R | V | A | T | D | H | Y | F | T | D |
| PANCE 1 | | | | | R | | | | | | |
| PANCE 2 | | | | S/T | R | | | | | | |
| PACE | TadA-8a | C | | S | R | N | N | D | Y | I | N |
| | TadA-8b | | A | S | R | N | N | | Y | I | N |
| | TadA-8c | C | | S | R | N | N | | Y | I | N |
| | TadA-8d | | A | | R | N | | | Y | | |
| | TadA-8e | | | S | R | N | N | D | Y | I | N |

[0499] In some embodiments, the TadA variant is a variant as shown in Table 6.1. Table 6.1 shows certain amino acid position numbers in the TadA amino acid sequence and the amino acids present in those positions in the TadA*7.10 adenosine deaminase. In some embodiments, the TadA variant is MSP605, MSP680, MSP823, MSP824, MSP825, MSP827, MSP828, or MSP829. In some embodiments, the TadA variant is MSP828. In some embodiments, the TadA variant is MSP829.

TABLE 6.1
TadA Variants

| | TadA Amino Acid Number | | | | | | | |
|---|---|---|---|---|---|---|---|---|
| Variant | 36 | 76 | 82 | 147 | 149 | 154 | 157 | 167 |
| TadA-7.10 | L | I | V | Y | F | Q | N | D |
| MSP605 | | | G | T | | S | | |
| MSP680 | | Y | G | T | | S | | |
| MSP823 | H | | G | T | | S | K | |
| MSP824 | | | G | D | Y | S | | N |
| MSP825 | H | | G | D | Y | S | K | N |
| MSP827 | H | Y | G | T | | S | K | |
| MSP828 | | Y | G | D | Y | S | | N |
| MSP829 | H | Y | G | D | Y | S | K | N |

[0500] In one embodiment, a fusion protein or complex of the invention comprises a wild-type TadA is linked to an adenosine deaminase variant described herein (e.g., TadA*8), which is linked to Cas9 nickase. In particular embodiments, the fusion proteins or complexes comprise a single TadA*8 domain (e.g., provided as a monomer). In other embodiments, the fusion protein or complex comprises TadA*8 and TadA(wt), which are capable of forming heterodimers.

[0501] In some embodiments, the adenosine deaminase comprises an amino acid sequence that is at least 60%, at least 65%, at least 70%, at least 75%, at least 80%, at least 85%, at least 90%, at least 95%, at least 96%, at least 97%, at least 98%, at least 99%, or at least 99.5% identical to any one of the amino acid sequences set forth in any of the adenosine deaminases provided herein. It should be appreciated that adenosine deaminases provided herein may include one or more mutations (e.g., any of the mutations provided herein). The disclosure provides any deaminase domains with a certain percent identity plus any of the mutations or combinations thereof described herein. In some embodiments, the adenosine deaminase comprises an amino acid sequence that has 1, 2, 3, 4, 5, 6, 7, 8, 9, 10, 11, 12, 13, 14, 15, 16, 17, 18, 19, 20, 21, 22, 21, 24, 25, 26, 27, 28, 29, 30, 31, 32, 33, 34, 35, 36, 37, 38, 39, 40, 41, 42, 43, 44, 45, 46, 47, 48, 49, 50, or more mutations compared to a reference sequence, or any of the adenosine deaminases provided herein. In some embodiments, the adenosine deaminase comprises an amino acid sequence that has at least 5, at least 10, at least 15, at least 20, at least 25, at least 30, at least 35, at least 40, at least 45, at least 50, at least 60, at least 70, at least 80, at least 90, at least 100, at least 110, at least 120, at least 130, at least 140, at least 150, at least 160, or at least 170 identical contiguous amino acid residues as compared to any one of the amino acid sequences known in the art or described herein.

[0502] In particular embodiments, a TadA*8 comprises one or more mutations at any of the following positions shown in bold. In other embodiments, a TadA*8 comprises one or more mutations at any of the positions shown with underlining:

| (SEQ ID NO: 1) | |
|---|---|
| MSEVEFSHEY WMRHALTLAK RARDEREVPV GAVLVLNNRV IGEGWNRAIG | 50 |
| LHDPTAHAEI MALRQGGLVM QNYRLIDATL YVTFEPCVMC AGAMIHSRIG | 100 |
| RVVFGVRNAK TGAAGSLMDV LHYPGMNHRV EITEGILADE CAALLCYFFR | 150 |
| MPRQVFNAQK KAQSSTD | |

[0503] For example, the TadA*8 comprises alterations at amino acid position 82 and/or 166 (e.g., V82S, T166R) alone or in combination with any one or more of the following Y147T, Y147R, Q154S, Y123H, and/or Q154R, relative to a TadA reference sequence (e.g., TadA*7.10 (SEQ ID NO: 1)), or a corresponding mutation in another TadA. In particular embodiments, a combination of alterations is selected from the group of: Y147T+Q154R; Y147T+Q154S; Y147R+Q154S; V82S+Q154S; V82S+Y147R; V82S+Q154R; V82S+Y123H; I76Y+V82S; V82S+Y123H+Y147T; V82S+Y123H+Y147R; V82S+Y123H+Q154R; Y147R+Q154R+Y123H; Y147R+Q154R+176Y; Y147R+Q154R+T166R; Y123H+Y147R+Q154R+I76Y; V82S+Y123H+Y147R+Q154R; and I76Y+V82S+Y123H+Y147R+Q154R, relative to a TadA reference sequence (e.g., TadA*7.10 (SEQ ID NO: 1)), or a corresponding mutation in another TadA.

[0504] In some embodiments, the TadA*8 is truncated. In some embodiments, the truncated TadA*8 is missing 1, 2, 3, 4, 5, 6, 7, 8, 9, 10, 11, 12, 13, 14, 15, 6, 17, 18, 19, or 20 N-terminal amino acid residues relative to the full length TadA*8. In some embodiments, the truncated TadA*8 is missing 1, 2, 3, 4, 5, 6, 7, 8, 9, 10, 11, 12, 13, 14, 15, 6, 17, 18, 19, or 20 C-terminal amino acid residues relative to the full length TadA*8. In some embodiments the adenosine deaminase variant is a full-length TadA*8.

[0505] In one embodiment, a fusion protein or complex of the invention comprises a wild-type TadA is linked to an adenosine deaminase variant described herein (e.g., TadA*8), which is linked to Cas9 nickase. In particular embodiments, the fusion proteins or complexes comprise a single TadA*8 domain (e.g., provided as a monomer). In other embodiments, the base editor comprises TadA*8 and TadA(wt), which are capable of forming heterodimers.

[0506] In particular embodiments, the fusion proteins or complexes comprise a single (e.g., provided as a monomer) TadA*8. In some embodiments, the TadA*8 is linked to a Cas9 nickase. In some embodiments, the fusion proteins or complexes of the invention comprise as a heterodimer of a wild-type TadA (TadA(wt)) linked to a TadA*8. In other embodiments, the fusion proteins or complexes of the invention comprise as a heterodimer of a TadA*7.10 linked to a TadA*8. In some embodiments, the base editor is ABE8 comprising a TadA*8 variant monomer. In some embodiments, the base editor is ABE8 comprising a heterodimer of a TadA*8 and a TadA(wt). In some embodiments, the base editor is ABE8 comprising a heterodimer of a TadA*8 and TadA*7.10. In some embodiments, the base editor is ABE8 comprising a heterodimer of a TadA*8. In some embodiments, the TadA*8 is selected from Table 6, 12, or 13. In some embodiments, the ABE8 is selected from Table 12, 13, or 15.

[0507] In some embodiments, the adenosine deaminase is a TadA*9 variant. In some embodiments, the adenosine deaminase is a TadA*9 variant selected from the variants described below and with reference to the following sequence (termed TadA*7.10):

(SEQ ID NO: 1)
MSEVEFSHEY WMRHALTLAK RARDEREVPV GAVLVLNNRV
IGEGWNRAIG LHDPTAHAEI MALROGGLVM QNYRLIDATL
YVTFEPCVMC AGAMIHSRIG RVVFGVRNAK TGAAGSLMDV
LHYPGMNHRV EITEGILADE CAALLCYFFR MPRQVFNAQK
KAQSSTD

[0508] In some embodiments, an adenosine deaminase comprises one or more of the following alterations: R21N, R23H, E25F, N38G, L51W, P54C, M70V, Q71M, N72K, Y73S, V82T, M94V, P124W, T133K, D139L, D139M, C146R, and A158K. The one or more alternations are shown in the sequence above in underlining and bold font.

[0509] In some embodiments, an adenosine deaminase comprises one or more of the following combinations of alterations: V82S+Q154R+Y147R; V82S+Q154R+Y123H; V82S+Q154R+Y147R+Y123H; Q154R+Y147R+Y123H+I76Y+V82S; V82S+I76Y; V82S+Y147R; V82S+Y147R+Y123H; V82S+Q154R+Y123H; Q154R+Y147R+Y123H+I76Y; V82S+Y147R; V82S+Y147R+Y123H; V82S+Q154R+Y123H; V82S+Q154R+Y147R; V82S+Q154R+Y147R; Q154R+Y147R+Y123H+I76Y; Q154R+Y147R+Y123H+I76Y+V82S; I76Y_V82S_Y123H_Y147R_Q154R; Y147R+Q154R+H123H; and V82S+Q154R.

[0510] In some embodiments, an adenosine deaminase comprises one or more of the following combinations of alterations: E25F+V82S+Y123H, T133K+Y147R+Q154R; E25F+V82S+Y123H+Y147R+Q154R; L51W+V82S+Y123H+C146R+Y147R+Q154R; Y73S+V82S+Y123H+Y147R+Q154R; P54C+V82S+Y123H+Y147R+Q154R; N38G+V82T+Y123H+Y147R+Q154R; N72K+V82S+Y123H+D139L+Y147R+Q154R; E25F+V82S+Y123H+D139M+Y147R+Q154R; Q71M+V82S+Y123H+Y147R+Q154R; E25F+V82S+Y123H+T133K+Y147R+Q154R; E25F+V82S+Y123H+Y147R+Q154R; V82S+Y123H+P124W+Y147R+Q154R; L51W+V82S+Y123H+C146R+Y147R+Q154R; P54C+V82S+Y123H+Y147R+Q154R; Y73S+V82S+Y123H+Y147R+Q154R; N38G+V82T+Y123H+Y147R+Q154R; R23H+V82S+Y123H+Y147R+Q154R; R21N+V82S+Y123H+Y147R+Q154R; V82S+Y123H+Y147R+Q154R+A158K; N72K+V82S+Y123H+D139L+Y147R+Q154R; E25F+V82S+Y123H+D139M+Y147R+Q154R; and M70V+V82S+M94V+Y123H+Y147R+Q154R

[0511] In some embodiments, an adenosine deaminase comprises one or more of the following combinations of alterations: Q71M+V82S+Y123H+Y147R+Q154R; E25F+I76Y+V82S+Y123H+Y147R+Q154R; I76Y+V82T+Y123H+Y147R+Q154R; N38G+I76Y+V82S+Y123H+Y147R+Q154R; R23H+176Y+V82S+Y123H+Y147R+Q154R; P54C+I76Y+V82S+Y123H+Y147R+Q154R; R21N+I76Y+V82S+Y123H+Y147R+Q154R; 176Y+V82S+Y123H+D139M+Y147R+Q154R; Y73S+176Y+V82S+Y123H+Y147R+Q154R; E25F+I76Y+V82S+Y123H+Y147R+Q154R; I76Y+V82T+Y123H+Y147R+Q154R; N38G+I76Y+V82S+Y123H+Y147R+Q154R; R23H+I76Y+V82S+Y123H+Y147R+Q154R; P54C+I76Y+V82S+Y123H+Y147R+Q154R; R21N+I76Y+V82S+Y123H+Y147R+Q154R; I76Y+V82S+Y123H+D139M+Y147R+Q154R; Y73S+I76Y+V82S+Y123H+Y147R+Q154R; and V82S+Q154R; N72K_V82S+Y123H+Y147R+Q154R; Q71M_V82S+Y123H+Y147R+Q154R; V82S+Y123H+T133K+Y147R+Q154R; V82S+Y123H+T133K+Y147R+Q154R+A158K; M70V+Q71M+N72K+V82S+Y123H+Y147R+Q154R; N72K_V82S+Y123H+Y147R+Q154R; Q71M_V82S+Y123H+Y147R+Q154R; M70V+V82S+M94V+Y123H+Y147R+Q154R; V82S+Y123H+T133K+Y147R+Q154R; V82S+Y123H+T133K+Y147R+Q154R+A158K; and M70V+Q71M+N72K+V82S+Y123H+Y147R+Q154R. In some embodiments, the adenosine deaminase is expressed as a monomer. In other embodiments, the adenosine deaminase is expressed as a heterodimer. In some embodiments, the deaminase or other polypeptide sequence lacks a methionine, for example when included as a component of a fusion protein. This can alter the numbering of positions. However, the skilled person will understand that such corresponding mutations refer to the same mutation, e.g., Y73S and Y72S and D139M and D138M.

[0512] In some embodiments, the TadA*9 variant comprises the alterations described in Table 16 as described herein. In some embodiments, the TadA*9 variant is a monomer. In some embodiments, the TadA*9 variant is a heterodimer with a wild-type TadA adenosine deaminase. In some embodiments, the TadA*9 variant is a heterodimer with another TadA variant (e.g., TadA*8, TadA*9). Additional details of TadA*9 adenosine deaminases are described in International PCT Application No. PCT/US2020/049975, which is incorporated herein by reference for its entirety.

[0513] Any of the mutations provided herein and any additional mutations (e.g., based on the ecTadA amino acid sequence) can be introduced into any other adenosine deaminases. Any of the mutations provided herein can be made individually or in any combination in a TadA reference sequence or another adenosine deaminase (e.g., ecTadA).

[0514] Details of A to G nucleobase editing proteins are described in International PCT Application No. PCT/US2017/045381 (WO2018/027078) and Gaudelli, N. M., et al., “Programmable base editing of A•T to G•C in genomic DNA without DNA cleavage” Nature, 551, 464-471 (2017), the entire contents of which are hereby incorporated by reference.

### C to T Editing

[0515] In some embodiments, a base editor disclosed herein comprises a fusion protein or complex comprising cytidine deaminase capable of deaminating a target cytidine (C) base of a polynucleotide to produce uridine (U), which has the base pairing properties of thymine. In some embodiments, for example where the polynucleotide is double-stranded (e.g., DNA), the uridine base can then be substituted with a thymidine base (e.g., by cellular repair machinery) to give rise to a C:G to a T:A transition. In other embodiments, deamination of a C to U in a nucleic acid by a base editor cannot be accompanied by substitution of the U to a T.

[0516] The deamination of a target C in a polynucleotide to give rise to a U is a non-limiting example of a type of base editing that can be executed by a base editor described herein. In another example, a base editor comprising a cytidine deaminase domain can mediate conversion of a cytosine (C) base to a guanine (G) base. For example, a U of a polynucleotide produced by deamination of a cytidine by a cytidine deaminase domain of a base editor can be excised from the polynucleotide by a base excision repair mechanism (e.g., by a uracil DNA glycosylase (UDG) domain), producing an abasic site. The nucleobase opposite the abasic site can then be substituted (e.g., by base repair machinery) with another base, such as a C, by for example a translesion polymerase. Although it is typical for a nucleobase opposite an abasic site to be replaced with a C, other substitutions (e.g., A, G or T) can also occur.

[0517] Accordingly, in some embodiments a base editor described herein comprises a deamination domain (e.g., cytidine deaminase domain) capable of deaminating a target C to a U in a polynucleotide. Further, as described below, the base editor can comprise additional domains which facilitate conversion of the U resulting from deamination to, in some embodiments, a T or a G. For example, a base editor comprising a cytidine deaminase domain can further comprise a uracil glycosylase inhibitor (UGI) domain to mediate substitution of a U by a T, completing a C-to-T base editing event. In another example, the base editor can comprise a uracil stabilizing protein as described herein. In another example, a base editor can incorporate a translesion polymerase to improve the efficiency of C-to-G base editing, since a translesion polymerase can facilitate incorporation of a C opposite an abasic site (i.e., resulting in incorporation of a G at the abasic site, completing the C-to-G base editing event).

[0518] A base editor comprising a cytidine deaminase as a domain can deaminate a target C in any polynucleotide, including DNA, RNA and DNA-RNA hybrids. Typically, a cytidine deaminase catalyzes a C nucleobase that is positioned in the context of a single-stranded portion of a polynucleotide. In some embodiments, the entire polynucleotide comprising a target C can be single-stranded. For example, a cytidine deaminase incorporated into the base editor can deaminate a target C in a single-stranded RNA polynucleotide. In other embodiments, a base editor comprising a cytidine deaminase domain can act on a double-stranded polynucleotide, but the target C can be positioned in a portion of the polynucleotide which at the time of the deamination reaction is in a single-stranded state. For example, in embodiments where the NAGPB domain comprises a Cas9 domain, several nucleotides can be left unpaired during formation of the Cas9-gRNA-target DNA complex, resulting in formation of a Cas9 “R-loop complex”. These unpaired nucleotides can form a bubble of single-stranded DNA that can serve as a substrate for a single-strand specific nucleotide deaminase enzyme (e.g., cytidine deaminase).

[0519] In some embodiments, a cytidine deaminase of a base editor comprises all or a portion (e.g., a functional portion) of an apolipoprotein B mRNA editing complex (APOBEC) family deaminase. APOBEC is a family of evolutionarily conserved cytidine deaminases. Members of this family are C-to-U editing enzymes. The N-terminal domain of APOBEC like proteins is the catalytic domain, while the C-terminal domain is a pseudocatalytic domain. More specifically, the catalytic domain is a zinc dependent cytidine deaminase domain and is important for cytidine deamination. APOBEC family members include APOBEC1, APOBEC2, APOBEC3A, APOBEC3B, APOBEC3C, APOBEC3D (“APOBEC3E” now refers to this), APOBEC3F, APOBEC3G, APOBEC3H, APOBEC4, and Activation-induced (cytidine) deaminase. In some embodiments, a deaminase incorporated into a base editor comprises all or a portion (e.g., a functional portion) of an APOBEC1 deaminase. In some embodiments, a deaminase incorporated into a base editor comprises all or a portion (e.g., a functional portion) of APOBEC2 deaminase. In some embodiments, a deaminase incorporated into a base editor comprises all or a portion (e.g., a functional portion) of is an APOBEC3 deaminase. In some embodiments, a deaminase incorporated into a base editor comprises all or a portion (e.g., a functional portion) of an APOBEC3A deaminase. In some embodiments, a deaminase incorporated into a base editor comprises all or a portion (e.g., a functional portion) of APOBEC3B deaminase. In some embodiments, a deaminase incorporated into a base editor comprises all or a portion (e.g., a functional portion) of APOBEC3C deaminase. In some embodiments, a deaminase incorporated into a base editor comprises all or a portion (e.g., a functional portion) of APOBEC3D deaminase. In some embodiments, a deaminase incorporated into a base editor comprises all or a portion (e.g., a functional portion) of APOBEC3E deaminase. In some embodiments, a deaminase incorporated into a base editor comprises all or a portion (e.g., a functional portion) of APOBEC3F deaminase. In some embodiments, a deaminase incorporated into a base editor comprises all or a portion (e.g., a functional portion) of APOBEC3G deaminase. In some embodiments, a deaminase incorporated into a base editor comprises all or a portion (e.g., a functional portion) of APOBEC3H deaminase. In some embodiments, a deaminase incorporated into a base editor comprises all or a portion (e.g., a functional portion) of APOBEC4 deaminase. In some embodiments, a deaminase incorporated into a base editor comprises all or a portion (e.g., a functional portion) of activation-induced deaminase (AID). In some embodiments a deaminase incorporated into a base editor comprises all or a portion (e.g., a functional portion) of cytidine deaminase 1 (CDA1). It should be appreciated that a base editor can comprise a deaminase from any suitable organism (e.g., a human or a rat). In some embodiments, a deaminase domain of a base editor is from a human, chimpanzee, gorilla, monkey, orangutan, alligator, pig, cow, dog, rat, or mouse. In some embodiments, the deaminase domain of the base editor is derived from rat (e.g., rat APOBEC1).

[0520] In some embodiments, the deaminase domain of the base editor is derived from an orangutan polypeptide (e.g., a Pongo pygmaeus (Orangutan) APOBEC). In some embodiments, the deaminase domain of the base editor is derived from a golden snub-nosed monkey polypeptide (e.g., a Rhinopithecus roxellana (golden snub-nosed monkey) APOBEC3F (A3F)). In some embodiments, the deaminase domain of the base editor is derived from an American Alligator polypeptide (e.g., an Alligator mississippiensis (American alligator) APOBEC1). In some embodiments, the deaminase domain of the base editor is derived from a pig polypeptide (e.g., a Sus scrofa (pig) APOBEC3B). In some embodiments, the deaminase domain of the base editor is human APOBEC1. In some embodiments, the deaminase domain of the base editor is pmCDA1.

[0521] Other exemplary deaminases that can be fused to Cas9 according to aspects of this disclosure are provided below. In embodiments, the deaminases are activation-induced deaminases (AID). It should be understood that, in some embodiments, the active domain of the respective sequence can be used, e.g., the domain without a localizing signal (nuclear localization sequence, without nuclear export signal, cytoplasmic localizing signal).

[0522] Some aspects of the present disclosure are based on the recognition that modulating the deaminase domain catalytic activity of any of the fusion proteins or complexes described herein, for example by making point mutations in the deaminase domain, affect the processivity of the fusion proteins (e.g., base editors) or complexes. For example, mutations that reduce, but do not eliminate, the catalytic activity of a deaminase domain within a base editing fusion protein or complexes can make it less likely that the deaminase domain will catalyze the deamination of a residue adjacent to a target residue, thereby narrowing the deamination window. The ability to narrow the deamination window can prevent unwanted deamination of residues adjacent to specific target residues, which can decrease or prevent off-target effects.

[0523] For example, in some embodiments, an APOBEC deaminase incorporated into a base editor comprises one or more mutations selected from the group consisting of H121X, H122X, R126X, R126X, RI 18X, W90X, W90X, and R132X of rAPOBEC1, or one or more corresponding mutations in another APOBEC deaminase, wherein X is any amino acid. In some embodiments, an APOBEC deaminase incorporated into a base editor can comprise one or more mutations selected from the group consisting of H121R, H122R, R126A, R126E, RI 18A, W90A, W90Y, and R132E of rAPOBEC1, or one or more corresponding mutations in another APOBEC deaminase.

[0524] In some embodiments, an APOBEC deaminase incorporated into a base editor comprises one or more mutations selected from the group consisting of D316X, D317X, R320X, R320X, R313X, W285X, W285X, R326X of hAPOBEC3G, or one or more corresponding mutations in another APOBEC deaminase, wherein X is any amino acid. In some embodiments, any of the fusion proteins or complexes provided herein comprise an APOBEC deaminase comprising one or more mutations selected from the group consisting of D316R, D317R, R320A, R320E, R313A, W285A, W285Y, R326E of hAPOBEC3G, or one or more corresponding mutations in another APOBEC deaminase.

[0525] In some embodiments, an APOBEC deaminase incorporated into a base editor comprises a H121R and a H122R mutation of rAPOBEC1, or one or more corresponding mutations in another APOBEC deaminase. In some embodiments an APOBEC deaminase incorporated into a base editor comprises an APOBEC deaminase comprising a R126A mutation of rAPOBEC1, or one or more corresponding mutations in another APOBEC deaminase. In some embodiments, an APOBEC deaminase incorporated into a base editor comprises an APOBEC deaminase comprising a R126E mutation of rAPOBEC1, or one or more corresponding mutations in another APOBEC deaminase. In some embodiments, an APOBEC deaminase incorporated into a base editor comprises an APOBEC deaminase comprising a R118A mutation of rAPOBEC1, or one or more corresponding mutations in another APOBEC deaminase. In some embodiments, an APOBEC deaminase incorporated into a base editor comprises an APOBEC deaminase comprising a W90A mutation of rAPOBEC1, or one or more corresponding mutations in another APOBEC deaminase. In some embodiments, an APOBEC deaminase incorporated into a base editor comprises an APOBEC deaminase comprising a W90Y mutation of rAPOBEC1, or one or more corresponding mutations in another APOBEC deaminase. In some embodiments, an APOBEC deaminase incorporated into a base editor comprises an APOBEC deaminase comprising a R132E mutation of rAPOBEC1, or one or more corresponding mutations in another APOBEC deaminase. In some embodiments an APOBEC deaminase incorporated into a base editor comprises an APOBEC deaminase comprising a W90Y and a R126E mutation of rAPOBEC1, or one or more corresponding mutations in another APOBEC deaminase. In some embodiments, an APOBEC deaminase incorporated into a base editor comprises an APOBEC deaminase comprising a R126E and a R132E mutation of rAPOBEC1, or one or more corresponding mutations in another APOBEC deaminase. In some embodiments, an APOBEC deaminase incorporated into a base editor comprises an APOBEC deaminase comprising a W90Y and a R132E mutation of rAPOBEC1, or one or more corresponding mutations in another APOBEC deaminase. In some embodiments, an APOBEC deaminase incorporated into a base editor comprises an APOBEC deaminase comprising a W90Y, R126E, and R132E mutation of rAPOBEC1, or one or more corresponding mutations in another APOBEC deaminase.

[0526] In some embodiments, an APOBEC deaminase incorporated into a base editor comprises an APOBEC deaminase comprising a D316R and a D317R mutation of hAPOBEC3G, or one or more corresponding mutations in another APOBEC deaminase. In some embodiments, any of the fusion proteins or complexes provided herein comprise an APOBEC deaminase comprising a R320A mutation of hAPOBEC3G, or one or more corresponding mutations in another APOBEC deaminase. In some embodiments, an APOBEC deaminase incorporated into a base editor comprises an APOBEC deaminase comprising a R320E mutation of hAPOBEC3G, or one or more corresponding mutations in another APOBEC deaminase. In some embodiments, an APOBEC deaminase incorporated into a base editor comprises an APOBEC deaminase comprising a R313A mutation of hAPOBEC3G, or one or more corresponding mutations in another APOBEC deaminase. In some embodiments, an APOBEC deaminase incorporated into a base editor comprises an APOBEC deaminase comprising a W285A mutation of hAPOBEC3G, or one or more corresponding mutations in another APOBEC deaminase. In some embodiments, an APOBEC deaminase incorporated into a base editor comprises an APOBEC deaminase comprising a W285Y mutation of hAPOBEC3G, or one or more corresponding mutations in another APOBEC deaminase. In some embodiments, an APOBEC deaminase incorporated into a base editor comprises an APOBEC deaminase comprising a R326E mutation of hAPOBEC3G, or one or more corresponding mutations in another APOBEC deaminase. In some embodiments, an APOBEC deaminase incorporated into a base editor comprises an APOBEC deaminase comprising a W285Y and a R320E mutation of hAPOBEC3G, or one or more corresponding mutations in another APOBEC deaminase. In some embodiments, an APOBEC deaminase incorporated into a base editor comprises an APOBEC deaminase comprising a R320E and a R326E mutation of hAPOBEC3G, or one or more corresponding mutations in another APOBEC deaminase. In some embodiments, an APOBEC deaminase incorporated into a base editor comprises an APOBEC deaminase comprising a W285Y and a R326E mutation of hAPOBEC3G, or one or more corresponding mutations in another APOBEC deaminase. In some embodiments, an APOBEC deaminase incorporated into a base editor comprises an APOBEC deaminase comprising a W285Y, R320E, and R326E mutation of hAPOBEC3G, or one or more corresponding mutations in another APOBEC deaminase.

[0527] A number of modified cytidine deaminases are commercially available, including, but not limited to, SaBE3, SaKKH-BE3, VQR-BE3, EQR-BE3, VRER-BE3, YE1-BE3, EE-BE3, YE2-BE3, and YEE-BE3, which are available from Addgene (plasmids 85169, 85170, 85171, 85172, 85173, 85174, 85175, 85176, 85177). In some embodiments, a deaminase incorporated into a base editor comprises all or a portion (e.g., a functional portion) of an APOBEC1 deaminase.

[0528] In some embodiments, the fusion proteins or complexes of the invention comprise one or more cytidine deaminase domains. In some embodiments, the cytidine deaminases provided herein are capable of deaminating cytosine or 5-methylcytosine to uracil or thymine. In some embodiments, the cytidine deaminases provided herein are capable of deaminating cytosine in DNA. The cytidine deaminase may be derived from any suitable organism. In some embodiments, the cytidine deaminase is a naturally-occurring cytidine deaminase that includes one or more mutations corresponding to any of the mutations provided herein. One of skill in the art will be able to identify the corresponding residue in any homologous protein, e.g., by sequence alignment and determination of homologous residues. Accordingly, one of skill in the art would be able to generate mutations in any naturally-occurring cytidine deaminase that corresponds to any of the mutations described herein. In some embodiments, the cytidine deaminase is from a prokaryote. In some embodiments, the cytidine deaminase is from a bacterium. In some embodiments, the cytidine deaminase is from a mammal (e.g., human).

[0529] In some embodiments, the cytidine deaminase comprises an amino acid sequence that is at least 60%, at least 65%, at least 70%, at least 75%, at least 80%, at least 85%, at least 90%, at least 95%, at least 96%, at least 97%, at least 98%, at least 99%, or at least 99.5% identical to any one of the cytidine deaminase amino acid sequences set forth herein. It should be appreciated that cytidine deaminases provided herein may include one or more mutations (e.g., any of the mutations provided herein). Some embodiments provide a polynucleotide molecule encoding the cytidine deaminase nucleobase editor polypeptide of any previous aspect or as delineated herein. In some embodiments, the polynucleotide is codon optimized.

[0530] The disclosure provides any deaminase domains with a certain percent identity plus any of the mutations or combinations thereof described herein. In some embodiments, the cytidine deaminase comprises an amino acid sequence that has 1, 2, 3, 4, 5, 6, 7, 8, 9, 10, 11, 12, 13, 14, 15, 16, 17, 18, 19, 20, 21, 22, 21, 24, 25, 26, 27, 28, 29, 30, 31, 32, 33, 34, 35, 36, 37, 38, 39, 40, 41, 42, 43, 44, 45, 46, 47, 48, 49, 50, or more mutations compared to a reference sequence, or any of the cytidine deaminases provided herein. In some embodiments, the cytidine deaminase comprises an amino acid sequence that has at least 5, at least 10, at least 15, at least 20, at least 25, at least 30, at least 35, at least 40, at least 45, at least 50, at least 60, at least 70, at least 80, at least 90, at least 100, at least 110, at least 120, at least 130, at least 140, at least 150, at least 160, or at least 170 identical contiguous amino acid residues as compared to any one of the amino acid sequences known in the art or described herein.

[0531] In embodiments, a fusion protein of the invention comprises two or more nucleic acid editing domains.

[0532] Details of C to T nucleobase editing proteins are described in International PCT Application No. PCT/US2016/058344 (WO2017/070632) and Komor, A. C., et al., “Programmable editing of a target base in genomic DNA without double-stranded DNA cleavage” Nature 533, 420-424 (2016), the entire contents of which are hereby incorporated by reference.

### Cytidine Adenosine Base Editors (CABEs)

[0533] In some embodiments, a base editor described herein comprises an adenosine deaminase variant that has increased cytidine deaminase activity. Such base editors may be referred to as “cytidine adenosine base editors (CABEs)” or “cytosine base editors derived from TadA* (CBE-Ts),” and their corresponding deaminase domains may be referred to as “TadA* acting on DNA cytosine (T_{AD}C)” domains. In some instances, an adenosine deaminase variant has both adenine and cytosine deaminase activity (i.e., is a dual deaminase). In some embodiments, the adenosine deaminase variants deaminate adenine and cytosine in DNA. In some embodiments, the adenosine deaminase variants deaminate adenine and cytosine in single-stranded DNA. In some embodiments, the adenosine deaminase variants deaminate adenine and cytosine in RNA. In some embodiments, the adenosine deaminase variant predominantly deaminates cytosine in DNA and/or RNA (e.g., greater than 30%, 40%, 50%, 60%, 70%, 80%, 90%, 95%, or 99% of all deaminations catalyzed by the adenosine deaminase variant, or the number of cytosine deaminations catalyzed by the variant is about or at least about 2-fold, 3-fold, 4-fold, 5-fold, 6-fold, 7-fold, 8-fold, 9-fold, 10-fold, 25-fold, 50-fold, 75-fold, 100-fold, 500-fold, or 1,000-fold greater than the number adenine deaminations catalyzed by the variant). In some embodiments, the adenosine deaminase variant has approximately equal cytosine and adenosine deaminase activity (e.g., the two activities are within about 10% or 20% of each other). In some embodiments, the adenosine deaminase variant has predominantly cytosine deaminase activity, and little, if any, adenosine deaminase activity. In some embodiments, the adenosine deaminase variant has cytosine deaminase activity, and no significant or no detectable adenosine deaminase activity. In some embodiments, the target polynucleotide is present in a cell in vitro or in vivo. In some embodiments, the cell is a bacteria, yeast, fungi, insect, plant, or mammalian cell.

[0534] In some embodiments, the CABE comprises a bacterial TadA deaminase variant (e.g., ecTadA). In some embodiments, the CABE comprises a truncated TadA deaminase variant. In some embodiments, the CABE comprises a fragment of a TadA deaminase variant. In some embodiments, the CABE comprises a TadA*8.20 variant.

[0535] In some embodiments, the adenosine deaminase variants of the invention comprise one or more alterations. In some embodiments, an adenosine deaminase variant of the invention is a TadA adenosine deaminase comprising one or more alterations that increase cytosine deaminase activity (e.g., at least about 10-fold, 20-fold, 30-fold, 40-fold, 50-fold, 60-fold, 70-fold or more increase) while maintaining adenosine deaminase activity (e.g., at least about 30%, 40%, 50% or more of the activity of a reference adenosine deaminase (e.g., TadA*8.20 or TadA*8.19)). In some embodiments, the adenosine deaminase variant is a bacterial TadA deaminase variant (e.g., ecTadA). In some embodiments, the adenosine deaminase variant is a truncated TadA deaminase variant. In some embodiments, the adenosine deaminase variant is a fragment of a TadA deaminase variant. In some embodiments, an adenosine deaminase variant is a TadA*8 variant comprising one or more alterations that increase cytosine deaminase activity (e.g., at least about 10-fold, 20-fold, 30-fold, 40-fold, 50-fold, 60-fold, 70-fold or more increase) while maintaining adenosine deaminase activity of at least about 30%, 40%, 50% or more of the adenosine deaminase activity of a reference adenosine deaminase (e.g., TadA*8.20 or TadA*8.19). In some embodiments, an adenosine deaminase variant is a TadA*8.20 adenosine deaminase comprising one or more alterations that increase cytosine deaminase activity (e.g., at least about 10-fold, 20-fold, 30-fold, 40-fold, 50-fold, 60-fold, 70-fold or more increase) while maintaining adenosine deaminase activity of at least 30%, 40%, 50% of the activity of a reference adenosine deaminase (e.g., TadA*8.20 or TadA*8.19). In some embodiments, an adenosine deaminase variant as provided herein has an increased cytosine deaminase activity of at least about 10-fold, 20-fold, 30-fold, 40-fold, 50-fold, 60-fold, 70-fold, 80-fold, 90-fold, 100-fold or more relative to a reference adenosine deaminase (e.g., TadA*8.20 or TadA*8.19). In some embodiments, an adenosine deaminase variant as provided herein maintains a level of adenosine deaminase activity that is at least about 30%, 40%, 50%, 60%, 70% of the activity of a reference adenosine deaminase (e.g., TadA*8.20 or TadA*8.19). In some embodiments, the reference adenosine deaminase is TadA*8.20 or TadA*8.19.

[0536] In some embodiments, the adenosine deaminase variant is an adenosine deaminase comprising one or more alterations that increase cytosine deaminase activity and has an amino acid sequence that is at least about 70%, 75%, 80%, 85%, 90%, 95%, 98%, 99% or greater identity to SEQ ID NO: 1 below:

(SEQ ID NO: 1)
MSEVEFSHEYWMRHALTLAKRARDEREVPVGAVLVLNNRVIGEGWNRAI
GLHDPTAHAEIMALRQGGLVMQNYRLIDATLYVTFEPCVMCAGAMIHSR
IGRVVFGVRNAKTGAAGSLMDVLHYPGMNHRVEITEGILADECAALLCY
FFRMPRQVFNAQKKAQSSTD.

[0537] In some embodiments, the adenosine deaminase variant is an adenosine deaminase comprising the amino acid sequence of SEQ ID NO: 1 and one or more alterations that increase cytosine deaminase activity. In various embodiments, the one or more alterations of the invention do not include a R amino acid at position 48 of SEQ ID NO: 1, or a corresponding mutation in another adenosine deaminase.

[0538] In some embodiments, the adenosine deaminase variant is an adenosine deaminase comprising one or more alterations at an amino acid position selected from 2, 4, 6, 13, 27, 29, 100, 112, 114, 115, 162, and 165 of an amino acid sequence having at least about 70%, 75%, 80%, 85%, 90%, 95%, 98%, 99% or greater identity to SEQ ID NO: 1, or a corresponding alteration in another deaminase. In some embodiments, the adenosine deaminase variant is an adenosine deaminase comprising two or more alterations at an amino acid position selected from the group consisting of 2, 4, 6, 8, 13, 17, 23, 27, 29, 30, 47, 48, 49, 67, 76, 77, 82, 84, 96, 100, 107, 112, 114, 115, 118, 119, 122, 127, 142, 143, 147, 149, 158, 159, 162 165, 166, and 167, of an amino acid sequence having at least about 70%, 75%, 80%, 85%, 90%, 95%, 98%, 99% or greater identity to SEQ ID NO: 1, or a corresponding alteration in another deaminase. In some embodiments, the two or more alterations are at an amino acid position selected from the group consisting of S2X, V4X, F6X, H8X, R13X, T17X, R23X, E27X, P29X, V30X, R47X, A48X, I49X, G67X, Y76X, D77X, S82X, F84X, H96X, G100X, R107X, G112X, A114X, G115X, M118X, D119X, H122X, N127X, A142X, A143X, R147X, Y147X, F149X, A158X, Q159X, A162X, S165X, T166X, and D167X of an amino acid sequence having at least about 70%, 75%, 80%, 85%, 90%, 95%, 98%, 99% or greater identity to SEQ ID NO: 1, or a corresponding alteration in another deaminase. In various embodiments, the alterations of the invention do not include a 48R mutation. In some embodiments, the adenosine deaminase variant is an adenosine deaminase comprising one or more alterations at an amino acid position selected from 2, 4, 6, 13, 27, 29, 100, 112, 114, 115, 162, and 165 of an amino acid sequence having at least about 70%, 75%, 80%, 85%, 90%, 95%, 98%, 99% or greater identity to SEQ ID NO: 1, or a corresponding alteration in another deaminase.

[0539] In some embodiments, the adenosine deaminase variant is an adenosine deaminase comprising one or more alterations selected from the group consisting of S2H, V4K, V4S, V4T, V4Y, F6G, F6H, F6Y, H8Q, R13G, T17A, T17W, R23Q, E27C, E27G, E27H, E27K, E27Q, E27S, E27G, P29A, P29G, P29K, V30F, V30I, R47G, R47S, A48G, I49K, I49M, I49N, I49Q, I49T, G67W, I76H, I76R, I76W, Y76H, Y76R, Y76W, F84A, F84M, H96N, G100A, G100K, T111H, G112H, A114C, G115M, M118L, H122G, H122R, H122T, N127I, N127K, N127P, A142E, R147H, A158V, Q159S, A162C, A162N, A162Q, and S165P of an amino acid sequence having at least about 70%, 75%, 80%, 85%, 90%, 95%, 98%, 99% or greater identity to SEQ ID NO: 1, or a corresponding alteration in another deaminase.

[0540] In some embodiments, the adenosine deaminase variant is an adenosine deaminase comprising a combination of amino acid alterations selected from: E27H, Y76I, and F84M; E27H, I49K, and Y76I; E27S, I49K, Y76I, and A162N; E27K and D119N; E27H and Y76I; E27S, I49K, and G67W; E27S, 149K, and Y76I; I49T, G67W, and H96N; E27C, Y76I, and D119N; R13G, E27Q, and N127K; T17A, E27H, 149M, Y76I, and M118L; I49Q, Y76I, and G115M; S2H, I49K, Y76I, and G112H; R47S and R107C; H8Q, I49Q, and Y76I; T17A, A48G, S82T, and A142E; E27G and I49N; E27G, D77G, and S165P; E27S, I49K, and S82T; E27S, I49K, S82T, and G115M; E27S, V30I, I49K, and S82T; E27S, V30F, I49K, S82T, F84A, R107C, and A142E; E27S, V30F, I49K, S82T, F84A, G112H, and A142E; E27S, V30F, I49K, S82T, F84A, G115M, and A142E; E27S, I49K, S82T, F84L, and R107C; E27S, I49K, S82T, F84L, and G112H; E27S, I49K, S82T, F84L, and G115M; E27S, I49K, S82T, F84L, R107C, and G112H; E27S, I49K, S82T, F84L, R107C, and G115M; E27S, I49K, S82T, F84L, R107C, and A142E; E27S, I49K, S82T, F84L, G112H, and A142E; E27S, I49K, S82T, F84L, G115M, and A142E; E27S, I49K, S82T, F84L, R107C, G112H, G115M, and A142E; E27S, V30I, I49K, S82T, and F84L; E27S, P29G, I49K, and S82T; E27S, P29G, I49K, S82T, and G115M; E27S, P29G, I49K, S82T, and A142E; P29G, I49K, and S82T; E27G, I49K, and S82T; E27G, I49K, S82T, R107C, and A142E; V4K, E27H, 149K, Y76I, and A114C; V4K, E27H, I49K, Y76I, and D77G; F6Y, E27H, I49K, Y76I, G100A, and H122R; V4T, E27H, I49K, Y76R, and H122G; F6Y, E27H, I49K, and Y76W; F6Y, E27H, I49K, Y76I, and D119N; F6Y, E27H, I49K, Y76I, and A114C; F6Y, E27H, I49K, and Y76I; V4K, E27H, 149K, Y76W, and H122T; F6G, E27H, I49K, Y76R, and G100K; F6H, E27H, I49K, Y76I, and H122N; E27H, I49K, Y76I, and A114C; F6Y, E27H, I49K, Y76H, H122R, and T166I; E27H, 149K, Y76I, and N127P; R23Q, E27H, I49K, and Y76R; E27H, I49K, Y76H, H122R, and A158V; F6Y, E27H, I49K, Y76I, and T111H; E27H, I49K, Y76I, and R147H; E27H, I49K, Y76I, and A143E; F6Y, E27H, I49K, and Y76R; T17W, E27H, I49K, Y76H, H122G, and A158V; V4S, E27H, I49K, A143E, and Q159S; E27H, I49K, Y76I, N127I, and A162Q; T17A, E27H, and A48G; T17A, E27K, and A48G; T17A, E27S, and A48G; T17A, E27S, A48G, and I49K; T17A, E27G, and A48G; T17A, A48G, and I49N; T17A, E27G, A48G, and I49N; T17A, E27Q, and A48G; E27S, I49K, S82T, and R107C; E27S, I49K, S82T, and G112H; E27S, I49K, S82T, and A142E; E27S, I49K, S82T, R107C, and G112H; E27S, I49K, S82T, R107C, and G115M; E27S, I49K, S82T, R107C, and A142E; E27S, I49K, S82T, G112H, and A142E; E27S, 149K, S82T, G115M, and A142E; E27S, I49K, S82T, R107C, G112H, G115M, and A142E; E27S, V30I, I49K, S82T, and R107C; E27S, V30I, I49K, S82T, and G112H; E27S, V30I, I49K, S82T, and G15M; E27S, V30I, I49K, S82T, and A142E; E27S, V30I, I49K, S82T, R107C, and G112H; E27S, V30I, I49K, S82T, R107C, and G115M; E27S, V30I, I49K, S82T, R107C, and A142E; E27S, V30I, I49K, S82T, G112H, and A142E; E27S, V30I, I49K, S82T, G115M, and A142E; E27S, V30I, I49K, S82T, R107C, G112H, G115M, and A142E; E27S, V30L, I49K, and S82T; E27S, V30L, I49K, S82T, and R107C; E27S, V30L, I49K, S82T, and G112H; E27S, V30L, 149K, S82T, and G115M; E27S, V30L, I49K, S82T, and A142E; E27S, V30L, I49K, S82T, R107C, and G112H; E27S, V30L, I49K, S82T, R107C, and G115M; E27S, V30L, I49K, S82T, R107C, and A142E; E27S, V30L, I49K, S82T, G112H, and A142E; E27S, V30L, I49K, S82T, G115M, and A142E; E27S, V30L, I49K, S82T, R107C, G112H, G115M, and A142E; E27S, V30F, 149K, S82T, and F84A; E27S, V30F, I49K, S82T, F84A, and R107C; E27S, V30F, I49K, S82T, F84A, and G112H; E27S, V30F, I49K, S82T, F84A, and G115M; E27S, V30F, I49K, S82T, F84A, and A142E; E27S, V30F, I49K, S82T, F84A, R107C, and G112H; E27S, V30F, I49K, S82T, F84A, R107C, and G115M; E27S, V30F, I49K, S82T, F84A, R107C, G112H, G115M, and A142E; E27S, I49K, S82T, and F84L; E27S, I49K, S82T, F84L, and A142E; E27S, V30I, I49K, S82T, F84L, and R107C; E27S, V30I, I49K, S82T, F84L, and G112H; E27S, V30I, I49K, S82T, F84L, and G115M; E27S, V30I, I49K, S82T, F84L, and A142E; E27S, V30I, I49K, S82T, F84L, R107C, and G112H; E27S, V30I, I49K, S82T, F84L, R107C, and G115M; E27S, V30I, I49K, S82T, F84L, R107C, and A142E; E27S, V30I, I49K, S82T, F84L, G112H, and A142E; E27S, V30I, I49K, S82T, F84L, G115M, and A142E; E27S, V30I, I49K, S82T, F84L, R107C, G112H, G115M, and A142E; E27S, P29G, I49K, S82T, and R107C; E27S, P29G, 149K, S82T, and G112H; E27S, P29G, I49K, S82T, R107C, and G112H; E27S, P29G, I49K, S82T, R107C, and G115M; E27S, P29G, I49K, S82T, R107C, and A142E; E27S, P29G, 149K, S82T, G112H, and A142E; E27S, P29G, I49K, S82T, G115M, and A142E; E27S, P29G, I49K, S82T, R107C, G112H, G115M, and A142E; P29G, I49K, S82T, and R107C; P29G, 149K, S82T, and G112H; P29G, I49K, S82T, and G115M; P29G, I49K, S82T, and A142E; P29G, I49K, S82T, R107C, and G112H; P29G, I49K, S82T, R107C, and G115M; P29G, I49K, S82T, R107C, and A142E; P29G, I49K, S82T, G112H, and A142E; P29G, I49K, S82T, G115M, and A142E; P29G, I49K, S82T, R107C, G112H, G115M, and A142E; P29K, I49K, and S82T; P29K, 149K, S82T, and R107C; P29K, I49K, S82T, and G112H; P29K, I49K, S82T, and G115M; P29K, I49K, S82T, and A142E; P29K, I49K, S82T, R107C, and G112H; P29K, I49K, S82T, R107C, and G115M; P29K, I49K, S82T, R107C, and A142E; P29K, I49K, S82T, G112H, and A142E; P29K, I49K, S82T, G115M, and A142E; P29K, I49K, S82T, R107C, G112H, G115M, and A142E; P29K, V30I, I49K, and S82T; P29K, V30I, I49K, S82T, and R107C; P29K, V30I, I49K, S82T, and G112H; P29K, V30I, I49K, S82T, and G115M; P29K, V30I, I49K, S82T, and A142E; P29K, V30I, I49K, S82T, R107C, and G112H; P29K, V30I, I49K, S82T, R107C, and G15M; P29K, V30I, I49K, S82T, R107C, and A142E; P29K, V30I, I49K, S82T, G112H, and A142E; P29K, V30I, I49K, S82T, G115M, and A142E; P29K, V30I, I49K, S82T, R107C, G112H, G115M, and A142E; P29K, I49K, S82T, and F84L; P29K, I49K, S82T, F84L, and R107C; P29K, I49K, S82T, F84L, and G112H; P29K, I49K, S82T, F84L, and G115M; P29K, I49K, S82T, F84L, and A142E; P29K, I49K, S82T, F84L, R107C, and G112H; P29K, I49K, S82T, F84L, R107C, and G115M; P29K, I49K, S82T, F84L, R107C, and A142E; P29K, I49K, S82T, F84L, G112H, and A142E; P29K, I49K, S82T, F84L, G115M, and A142E; P29K, I49K, S82T, F84L, R107C, G112H, G115M, and A142E; P29K, V30I, I49K, S82T, and F84L; P29K, V30I, I49K, S82T, F84L, and R107C; P29K, V30I, I49K, S82T, F84L, and G112H; P29K, V30I, I49K, S82T, F84L, and G115M; P29K, V30I, I49K, S82T, F84L, and A142E; P29K, V30I, I49K, S82T, F84L, R107C, and G112H; P29K, V30I, I49K, S82T, F84L, R107C, and G115M; P29K, V30I, I49K, S82T, F84L, R107C, and A142E; P29K, V30I, I49K, S82T, F84L, G112H, and A142E; P29K, V30I, I49K, S82T, F84L, G115M, and A142E; P29K, V30I, I49K, S82T, F84L, R107C, G112H, G115M, and A142E; E27G, I49K, S82T, and R107C; E27G, 149K, S82T, and G112H; E27G, I49K, S82T, and G115M; E27G, I49K, S82T, and A142E; E27G, I49K, S82T, R107C, and G112H; E27G, I49K, S82T, R107C, and G115M; E27G, I49K, S82T, G112H, and A142E; E27G, I49K, S82T, G115M, and A142E; E27G, I49K, S82T, R107C, G112H, G115M, and A142E; E27H, I49K, and S82T; E27H, I49K, S82T, and R107C; E27H, 149K, S82T, and G112H; E27H, I49K, S82T, and G115M; E27H, I49K, S82T, and A142E; E27H, I49K, S82T, R107C, and G112H; E27H, I49K, S82T, R107C, and G115M; E27H, I49K, S82T, R107C, and A142E; E27H, I49K, S82T, G112H, and A142E; E27H, I49K, S82T, G115M, and A142E; E27H, I49K, S82T, R107C, G112H, G115M, and A142E; E27S, and S82T; E27S, S82T, and R107C; E27S, S82T, and G112H; E27S, S82T, and G115M; E27S, S82T, and A142E; E27S, S82T, R107C, and G112H; E27S, S82T, R107C, and G115M; E27S, S82T, R107C, and A142E; E27S, S82T, G112H, and A142E; E27S, S82T, G115M, and A142E; E27S, S82T, R107C, G112H, G115M, and A142E; P29A, and S82T; P29A, S82T, and R107C; P29A, S82T, and G112H; P29A, S82T, and G115M; P29A, S82T, and A142E; P29A, S82T, R107C, and G112H; P29A, S82T, R107C, and G115M; P29A, S82T, R107C, and A142E; P29A, S82T, G112H, and A142E; P29A, S82T, G115M, and A142E; P29A, S82T, R107C, G112H, G115M, and A142E; E27S, V30I, and S82T; E27S, V30I, S82T, and R107C; E27S, V30I, S82T, and G112H; E27S, V30I, S82T, and G115M; E27S, V30I, S82T, and A142E; E27S, V30I, S82T, R107C, and G112H; E27S, V30I, S82T, R107C, and G115M; E27S, V30I, S82T, R107C, and A142E; E27S, V30I, S82T, G112H, and A142E; E27S, V30I, S82T, G115M, and A142E; E27S, V30I, S82T, R107C, G112H, G115M, and A142E; P29A, V30I, S82T, and F84L; P29A, V30I, S82T, F84L, and R107C; P29A, V30I, S82T, F84L, and G112H; P29A, V30I, S82T, F84L, and G115M; P29A, V30I, S82T, F84L, and A142E; P29A, V30I, S82T, F84L, R107C, and G112H; P29A, V30I, S82T, F84L, R107C, and G115M; P29A, V30I, S82T, F84L, R107C, and A142E; P29A, V30I, S82T, F84L, G112H, and A142E; P29A, V30I, S82T, F84L, G115M, and A142E; P29A, V30I, S82T, F84L, R107C, G112H, G115M, and A142E; E27S, P29A, V30L, I49K, S82T, F84L, R107C, G112H, G115M, and A142E; V4K, and A114C; V4K, and D77G; F6Y, G100A, and H122R; V4T, I76R, and H122G; F6Y, and I76W; F6Y, and D119N; F6Y, and A114C; V4K, I76W, and H122T; F6G, I76R, and G100K; F6H, and H122N; F6Y, 176H, H122R, and T166I; R23Q, and I76R; I76H, H122R, and A158V; F6Y, and T111H; T111H, H122G, and A162C; F6Y, and I76R; T17W, I76H, H122G, and A158V; V4S, I76Y, A143E, and Q159S; N127I, A162Q; E27H, Y76I, F84M, and F149Y; E27H, I49K, Y76I, and F149Y; T17A, E27H, 149M, Y76I, M118L, and F149Y; T17A, A48G, S82T, A142E, and F149Y; E27G, and F149Y; E27G, I49N, and F149Y; E27H, Y76I, F84M, Y147D, F149Y, T166I, and D167N; E27H, I49K, Y76I, Y147D, F149Y, T166I, D167N; T17A, E27H, I49M, Y76I, M118L, Y147D, F149Y, T166I, and D167N; T17A, A48G, S82T, A142E, Y147D, F149Y, T166I, and D167N; E27G, Y147D, F149Y, T166I, and D167N; E27G, I49N, Y147D, F149Y, T166I, and D167N; F6Y, E27H, I49K, Y76W, S82T, R107C, G112H, G115M, and A142E; F6Y, E27H, I49K, D77G, S82T, R107C, G112H, G115M, and A142E; F6Y, E27H, I49K, S82T, R107C, G112H, A114C, G115M, and A142E; F6Y, E27H, I49K, S82T, R107C, G112H, G115M, D119N, and A142E; F6Y, E27H, I49K, S82T, R107C, G112H, G115M, H122G, and A142E; F6Y, E27H, I49K, S82T, R107C, G112H, G115M, N127P, and A142E; F6Y, E27H, I49K, S82T, R107C, G112H, G115M, A142E, and A143E; F6Y, E27H, I49K, S82T, R107C, G112H, G115M, and A143E; F6Y, E27H, I49K, Y76W, D77G, S82T, R107C, G112H, G115M, and A142E; F6Y, E27H, I49K, Y76W, S82T, R107C, G112H, A114C, G115M, and A142E; F6Y, E27H, I49K, Y76W, S82T, R107C, G112H, G115M, D119N, and A142E; F6Y, E27H, I49K, Y76W, S82T, R107C, G112H, G115M, H122G, and A142E; F6Y, E27H, I49K, Y76W, S82T, R107C, G112H, G115M, N127P, and A142E; F6Y, E27H, I49K, Y76W, S82T, R107C, G112H, G115M, A142E, and A143E; F6Y, E27H, I49K, Y76W, S82T, R107C, G112H, G115M, and A143E; F6Y, E27H, I49K, D77G, S82T, R107C, G112H, A114C, G115M, and A142E; F6Y, E27H, I49K, D77G, S82T, R107C, G112H, G115M, D119N, and A142E; F6Y, E27H, I49K, D77G, S82T, R107C, G112H, G115M, H122G, and A142E; F6Y, E27H, I49K, D77G, S82T, R107C, G112H, G115M, N127P, and A142E; F6Y, E27H, I49K, D77G, S82T, R107C, G112H, G115M, A142E, and A143E; F6Y, E27H, I49K, D77G, S82T, R107C, G112H, G115M, and A143E; F6Y, E27H, I49K, S82T, R107C, G112H, A114C, G115M, D119N, and A142E; F6Y, E27H, I49K, S82T, R107C, G112H, A114C, G115M, H122G, and A142E; F6Y, E27H, I49K, S82T, R107C, G112H, A114C, G115M, N127P, and A142E; F6Y, E27H, I49K, S82T, R107C, G112H, G115M, D119N, H122G, and A142E; F6Y, E27H, 149K, S82T, R107C, G112H, G115M, D119N, N127P, and A142E; F6Y, E27H, I49K, S82T, R107C, G112H, G115M, H122G, N127P, and A142E; F6Y, E27H, I49K, Y76W, D77G, S82T, R107C, G112H, A114C, G115M, and A142E; F6Y, E27H, I49K, Y76W, D77G, S82T, R107C, G112H, G115M, D119N, and A142E; F6Y, E27H, I49K, Y76W, D77G, S82T, R107C, G112H, G115M, H122G, and A142E; F6Y, E27H, I49K, Y76W, D77G, S82T, R107C, G112H, G115M, N127P, and A142E; F6Y, E27H, I49K, Y76W, D77G, S82T, R107C, G112H, G115M, A142E, and A143E; F6Y, E27H, I49K, Y76W, D77G, S82T, R107C, G112H, G115M, and A143E; F6Y, E27H, I49K, Y76W, S82T, R107C, G112H, A114C, G115M, D119N, and A142E; F6Y, E27H, I49K, Y76W, S82T, R107C, G112H, A114C, G115M, H122G, and A142E; F6Y, E27H, I49K, Y76W, S82T, R107C, G112H, A114C, G115M, N127P, and A142E; F6Y, E27H, I49K, Y76W, S82T, R107C, G112H, A114C, G115M, A142E, and A143E; F6Y, E27H, I49K, Y76W, S82T, R107C, G112H, A114C, G115M, and A143E; F6Y, E27H, I49K, Y76W, S82T, R107C, G112H, G115M, D119N, H122G, and A142E; F6Y, E27H, I49K, Y76W, S82T, R107C, G112H, G115M, D119N, N127P, and A142E; F6Y, E27H, I49K, Y76W, S82T, R107C, G112H, G115M, H122G, N127P, and A142E; F6Y, E27H, I49K, Y76W, S82T, R107C, G112H, A114C, G115M, D119N, H122G, and A142E; F6Y, E27H, I49K, Y76W, S82T, R107C, G112H, A114C, G115M, D119N, N127P, and A142E; F6Y, E27H, I49K, Y76W, S82T, R107C, G112H, A114C, G115M, H122G, N127P, and A142E; F6Y, E27H, I49K, Y76W, D77G, S82T, R107C, G112H, A114C, G115M, D119N, and A142E; F6Y, E27H, I49K, Y76W, D77G, S82T, R107C, G112H, A114C, G115M, H122G, and A142E; F6Y, E27H, I49K, Y76W, D77G, S82T, R107C, G112H, A114C, G115M, N127P, and A142E; F6Y, E27H, I49K, Y76W, D77G, S82T, R107C, G112H, A114C, G115M, A142E, and A143E; F6Y, E27H, I49K, Y76W, D77G, S82T, R107C, G112H, A114C, G115M, and A143E; F6Y, E27H, I49K, Y76W, D77G, S82T, R107C, G112H, A114C, G115M, D119N, H122G, and A142E; F6Y, E27H, I49K, Y76W, D77G, S82T, R107C, G112H, A114C, G115M, D119N, N127P, and A142E; F6Y, E27H, I49K, Y76W, D77G, S82T, R107C, G112H, A114C, G115M, H122G, N127P, and A142E; F6Y, E27H, I49K, Y76W, S82T, R107C, G112H, A114C, G115M, D119N, H122G, N127P, A142E, and A143E; F6Y, E27H, I49K, Y76W, S82T, R107C, G112H, A114C, G115M, D119N, H122G, N127P, and A143E; F6Y, E27H, I49K, Y76W, D77G, S82T, R107C, G112H, A114C, G115M, D119N, H122G, N127P, A142E, and A143E; and F6Y, E27H, I49K, Y76W, D77G, S82T, R107C, G112H, A114C, G115M, D119N, H122G, N127P, and A143E; of an amino acid sequence having at least about 70%, 75%, 80%, 85%, 90%, 95%, 98%, 99% or greater identity to SEQ ID NO: 1, or a corresponding combination of alterations in another deaminase.

[0541] In some embodiments, the adenosine deaminase variant is an adenosine deaminase comprising an amino acid alteration or combination of amino acid alterations selected from those listed in any of Tables 6.2A-6.2F.

[0542] The residue identity of exemplary adenosine deaminase variants that are capable of deaminating adenine and/or cytidine in a target polynucleotide (e.g., DNA) is provided in Tables 6.2A-6.2F below. Further examples of adenosine deaminse variants include the following variants of 1.17 (see Table 6.2A): 1.17+E27H; 1.17+E27K; 1.17+E27S; 1.17+E27S+149K; 1.17+E27G; 1.17+149N; 1.17+E27G+I49N; and 1.17+E27Q. In some embodiments, any of the amino acid alterations provided herein are substituted with a conservative amino acid. Additional mutations known in the art can be further added to any of the adenosine deaminase variants provided herein.

[0543] In some embodiments, base editing is carried out to induce therapeutic changes in the genome of a cell of a subject (e.g., human). Cells are collected from a subject and contacted with one or more guide RNAs and a nucleobase editor polypeptide comprising a nucleic acid programmable DNA binding protein (napDNAbp) (e.g., Cas9) and an adenosine deaminase variant capable of deaminating both adenine and cytosine in a target polynucleotide (e.g., DNA). In some embodiments, cells are contacted with one or more guide RNAs and a fusion protein comprising a nucleic acid programmable DNA binding protein (napDNAbp) (e.g., Cas9) and an adenosine deaminase variant capable of deaminating both adenine and cytosine in a target polynucleotide (e.g., DNA). In some embodiments, the napDNAbp is a Cas9.

[0544] In some embodiments, cells are contacted with a multi-molecular complex. In some embodiments, cells are contacted with a base editor system as provided herein. In some embodiments, the base editor systems as provided herein comprise an adenosine base editor (ABE) variant (e.g., a CABE). In some embodiments, the CABE variant is an ABE8 variant. In some embodiments, the ABE8 variant is an ABE8.20 variant. In some embodiments, CABEs as provided herein have both A to G and C to T base editing activity. Therefore, multiple edits may be introduced into the genome of a subject (e.g., human). The ability to target both A to G and C to T base editing activity allows for diverse targeting of polynucleotides in the genome in a subject to treat a genetic disease or disorder.

[0545] In some embodiments, the base editor systems comprising a CABE provided herein have at least about a 30%, 40%, 50%, 60%, 70% or more C to T editing activity in a target polynucleotide (e.g., DNA). In some embodiments, a base editor system comprising a CABE as provided herein has an increased C to T base editing activity (e.g., increased at least about 30-fold, 40-fold, 50-fold, 60-fold, 70-fold or more) relative to a reference base editor system comprising a reference adenosine deaminase (e.g., TadA*8.20 or TadA*8.19).

TABLE 6.2A
Adenosine Deaminase Variants (CABE-1; T_{AD}AC-1). Mutations are indicated with reference to TadA*8.20.

| | location in structure | | | | | | | | | | | | | |
|---|---|---|---|---|---|---|---|---|---|---|---|---|---|---|
| | | | | | near | near | near | near | | | | | | |
| | | surface | surface | surface | active | active | active | active | | | | | | |
| | N/A | h1 | h1 | h1 | site | site | site | site | | surface | | | | |
| | Amino Acid No. (*START Met is AA#1) | | | | | | | | | | | | | |
| | 2 | 8 | 13 | 17 | 27 | 47 | 48 | 49 | 67 | 76 | 77 | | | |
| | TadA*8.20 | | | | | | | | | | | | | |
| | S | H | R | T | E | R | A | I | G | Y | D | | | |
| | TadA*8.19 | | | | | | | | | | | Plasmid #s | | |
| | | | | | | | | | | I | | without ugi | with ugi | bacterial |
| 1.1 | | | | | H | | | | | I | | pDKL-11 | pDKL-23 | pDKL-35 |
| 1.2 | | | | | H | | | K | | I | | pDKL-12 | pDKL-24 | pDKL-36 |
| 1.3 | | | | | S | | | K | | I | | pDKL-13 | pDKL-25 | pDKL-37 |
| 1.4 | | | | | S | | | K | | I | | pDKL-14 | pDKL-26 | pDKL-38 |
| 1.5 | | | | | K | | | | | | | PDKL-15 | pDKL-27 | pDKL-39 |
| 1.6 | | | | | K | | | | | | | pDKL-16 | pDKL-28 | pDKL-40 |
| 1.7 | | | | | H | | | | | I | | pDKL-17 | pDKL-29 | pDKL-41 |
| 1.8 | | | | | S | | | K | W | | | pDKL-18 | pDKL-30 | pDKL-42 |
| 1.9 | | | | | | | | T | W | | | pDKL-19 | pDKL-31 | pDKL-43 |
| 1.10 | | | | | C | | | | | I | | pDKL-20 | pDKL-32 | pDKL-44 |
| 1.11 | | | G | | Q | | | | | | | pDKL-21 | pDKL-33 | pDKL-45 |
| 1.12 | | | | A | H | | | M | | I | | pDKL-22 | pDKL-34 | pDKL-46 |
| 1.13 | | | | | | | | Q | | I | | pDKL-47 | pDKL-55 | pDKL-63 |
| 1.14 | H | | | | | | | K | | I | | pDKL-48 | pDKL-56 | pDKL-64 |
| 1.15 | | | | | | S | | | | | | pDKL-49 | pDKL-57 | pDKL-65 |
| 1.16 | | Q | | | | | | Q | | I | | pDKL-50 | pDKL-58 | pDKL-66 |
| 1.17 | | | | A | | | G | | | | | pDKL-51 | pDKL-59 | pDKL-67 |
| 1.18 | | | | | G | | | | | | | pDKL-52 | pDKL-60 | pDKL-68 |
| 1.19 | | | | | G | | | N | | | | pDKL-53 | pDKL-61 | pDKL-69 |
| 1.20 | | | | | G | | | | | | G | pDKL-54 | pDKL-62 | pDKL-70 |

| | location in structure | | | | | | | | | | | | | | |
|---|---|---|---|---|---|---|---|---|---|---|---|---|---|---|---|
| | | near | | near | | | | | | | | | | | |
| | | active | | active | | | | | | | | | | | |
| | internal | site | | site | surface | | surface | surface | surface | | surface | | | | |
| | Amino Acid No. (*START Met is AA#1) | | | | | | | | | | | | | | |
| | 82 | 84 | 96 | 107 | 112 | 115 | 118 | 119 | 127 | 142 | 162 | 165 | | | |
| | TadA*8.20 | | | | | | | | | | | | | | |
| | S | F | H | R | G | G | M | D | N | A | A | S | Plasmid #s | | |
| | TadA*8.19 | | | | | | | | | | | | without ugi | with ugi | bacterial |
| 1.1 | | M | | | | | | | | | | | pDKL-11 | pDKL-23 | pDKL-35 |
| 1.2 | | | | | | | | | | | | | pDKL-12 | pDKL-24 | pDKL-36 |
| 1.3 | | | | | | | | | | | | | pDKL-13 | pDKL-25 | pDKL-37 |
| 1.4 | | | | | | | | | | | N | | pDKL-14 | pDKL-26 | pDKL-38 |
| 1.5 | | | | | | | | | | | | | pDKL-15 | pDKL-27 | pDKL-39 |
| 1.6 | | | | | | | | N | | | | | pDKL-16 | pDKL-28 | pDKL-40 |
| 1.7 | | | | | | | | | | | | | pDKL-17 | pDKL-29 | pDKL-41 |
| 1.8 | | | | | | | | | | | | | pDKL-18 | pDKL-30 | pDKL-42 |
| 1.9 | | | N | | | | | | | | | | pDKL-19 | pDKL-31 | pDKL-43 |
| 1.10 | | | | | | | | N | | | | | pDKL-20 | pDKL-32 | pDKL-44 |
| 1.11 | | | | | | | | | K | | | | pDKL-21 | pDKL-33 | pDKL-45 |
| 1.12 | | | | | | | L | | | | | | pDKL-22 | pDKL-34 | pDKL-46 |
| 1.13 | | | | | | M | | | | | | | pDKL-47 | pDKL-55 | pDKL-63 |
| 1.14 | | | | | H | | | | | | | | pDKL-48 | pDKL-56 | pDKL-64 |
| 1.15 | | | | C | | | | | | | | | pDKL-49 | pDKL-57 | pDKL-65 |
| 1.16 | | | | | | | | | | | | | pDKL-50 | pDKL-58 | pDKL-66 |
| 1.17 | T | | | | | | | | | E | | | pDKL-51 | pDKL-59 | pDKL-67 |
| 1.18 | | | | | | | | | | | | | pDKL-52 | pDKL-60 | pDKL-68 |
| 1.19 | | | | | | | | | | | | | pDKL-53 | pDKL-61 | pDKL-69 |
| 1.20 | | | | | | | | | | | | P | pDKL-54 | pDKL-62 | pDKL-70 |

TABLE 6.2B
Rationally Designed Candidate Editors (CABE-2s; TADAC-
2s). Mutations are indicated with reference to TadA*8.20.

| | Position No. | | | | | | | | | |
|---|---|---|---|---|---|---|---|---|---|---|
| | 27 | 29 | 30 | 49 | 82 | 84 | 107 | 112 | 115 | 142 |
| | TadA*8.20 | | | | | | | | | |
| | E | P | V | I | S | F | R | G | G | A |
| | Alterations Evaluated | | | | | | | | | |
| | G/S/H | G/A/K | I/L/F | K | T | L/A | C | H | M | E |
| S1.1 | S | | | K | T | | | | | |
| S1.2 | S | | | K | T | | C | | | |
| S1.3 | S | | | K | T | | | H | | |
| S1.4 | S | | | K | T | | | | M | |
| S1.5 | S | | | K | T | | | | | E |
| S1.6 | S | | | K | T | | C | H | | |
| S1.7 | S | | | K | T | | C | | M | |
| S1.8 | S | | | K | T | | C | | | E |
| S1.9 | S | | | K | T | | | H | | E |
| S1.10 | S | | | K | T | | | | M | E |
| S1.11 | S | | | K | T | | C | H | M | E |
| S1.12 | S | | I | K | T | | | | | |
| S1.13 | S | | I | K | T | | C | | | |
| S1.14 | S | | I | K | T | | | H | | |
| S1.15 | S | | I | K | T | | | | M | |
| S1.16 | S | | I | K | T | | | | | E |
| S1.17 | S | | I | K | T | | C | H | | |
| S1.18 | S | | I | K | T | | C | | M | |
| S1.19 | S | | I | K | T | | C | | | E |
| S1.20 | S | | I | K | T | | | H | | E |
| S1.21 | S | | I | K | T | | | | M | E |
| S1.22 | S | | I | K | T | | C | H | M | E |
| S1.23 | S | | L | K | T | | | | | |
| S1.24 | S | | L | K | T | | C | | | |
| S1.25 | S | | L | K | T | | | H | | |
| S1.26 | S | | L | K | T | | | | M | |
| S1.27 | S | | L | K | T | | | | | E |
| S1.28 | S | | L | K | T | | C | H | | |
| S1.29 | S | | L | K | T | | C | | M | |
| S1.30 | S | | L | K | T | | C | | | E |
| S1.31 | S | | L | K | T | | | H | | E |
| S1.32 | S | | L | K | T | | | | M | E |
| S1.33 | S | | L | K | T | | C | H | M | E |
| S1.34 | S | | F | K | T | A | | | | |
| S1.35 | S | | F | K | T | A | C | | | |
| S1.36 | S | | F | K | T | A | | H | | |
| S1.37 | S | | F | K | T | A | | | M | |
| S1.38 | S | | F | K | T | A | | | | E |
| S1.39 | S | | F | K | T | A | C | H | | |
| S1.40 | S | | F | K | T | A | C | | M | |
| S1.41 | S | | F | K | T | A | C | | | E |
| S1.42 | S | | F | K | T | A | | H | | E |
| S1.43 | S | | F | K | T | A | | | M | E |
| S1.44 | S | | F | K | T | A | C | H | M | E |
| S1.45 | S | | | K | T | L | | | | |
| S1.46 | S | | | K | T | L | C | | | |
| S1.47 | S | | | K | T | L | | H | | |
| S1.48 | S | | | K | T | L | | | M | |
| S1.49 | S | | | K | T | L | | | | E |
| S1.50 | S | | | K | T | L | C | H | | |
| S1.51 | S | | | K | T | L | C | | M | |
| S1.52 | S | | | K | T | L | C | | | E |
| S1.53 | S | | | K | T | L | | H | | E |
| S1.54 | S | | | K | T | L | | | M | E |
| S1.55 | S | | | K | T | L | C | H | M | E |
| S1.56 | S | | I | K | T | L | | | | |
| S1.57 | S | | I | K | T | L | C | | | |
| S1.58 | S | | I | K | T | L | | H | | |
| S1.59 | S | | I | K | T | L | | | M | |
| S1.60 | S | | I | K | T | L | | | | E |
| S1.61 | S | | I | K | T | L | C | H | | |
| S1.62 | S | | I | K | T | L | C | | M | |
| S1.63 | S | | I | K | T | L | C | | | E |
| S1.64 | S | | I | K | T | L | | H | | E |
| S1.65 | S | | I | K | T | L | | | M | E |
| S1.66 | S | | I | K | T | L | C | H | M | E |
| S1.67 | S | G | | K | T | | | | | |
| S1.68 | S | G | | K | T | | C | | | |
| S1.69 | S | G | | K | T | | | H | | |
| S1.70 | S | G | | K | T | | | | M | |
| S1.71 | S | G | | K | T | | | | | E |
| S1.72 | S | G | | K | T | | C | H | | |
| S1.73 | S | G | | K | T | | C | | M | |
| S1.74 | S | G | | K | T | | C | | | E |
| S1.75 | S | G | | K | T | | | H | | E |
| S1.76 | S | G | | K | T | | | | M | E |
| S1.77 | S | G | | K | T | | C | H | M | E |
| S1.78 | | G | | K | T | | | | | |
| S1.79 | | G | | K | T | | C | | | |
| S1.80 | | G | | K | T | | | H | | |
| S1.81 | | G | | K | T | | | | M | |
| S1.82 | | G | | K | T | | | | | E |
| S1.83 | | G | | K | T | | C | H | | |
| S1.84 | | G | | K | T | | C | | M | |
| S1.85 | | G | | K | T | | C | | | E |
| S1.86 | | G | | K | T | | | H | | E |
| S1.87 | | G | | K | T | | | | M | E |
| S1.88 | | G | | K | T | | C | H | M | E |
| S1.89 | | K | | K | T | | | | | |
| S1.90 | | K | | K | T | | C | | | |
| S1.91 | | K | | K | T | | | H | | |
| S1.92 | | K | | K | T | | | | M | |
| S1.93 | | K | | K | T | | | | | E |
| S1.94 | | K | | K | T | | C | H | | |
| S1.95 | | K | | K | T | | C | | M | |
| S1.96 | | K | | K | T | | C | | | E |
| S1.97 | | K | | K | T | | | H | | E |
| S1.98 | | K | | K | T | | | | M | E |
| S1.99 | | K | | K | T | | C | H | M | E |
| S1.100 | | K | I | K | T | | | | | |
| S1.101 | | K | I | K | T | | C | | | |
| S1.102 | | K | I | K | T | | | H | | |
| S1.103 | | K | I | K | T | | | | M | |
| S1.104 | | K | I | K | T | | | | | E |
| S1.105 | | K | I | K | T | | C | H | | |
| S1.106 | | K | I | K | T | | C | | M | |
| S1.107 | | K | I | K | T | | C | | | E |
| S1.108 | | K | I | K | T | | | H | | E |
| S1.109 | | K | I | K | T | | | | M | E |
| S1.110 | | K | I | K | T | | C | H | M | E |
| S1.111 | | K | | K | T | L | | | | |
| S1.112 | | K | | K | T | L | C | | | |
| S1.113 | | K | | K | T | L | | H | | |
| S1.114 | | K | | K | T | L | | | M | |
| S1.115 | | K | | K | T | L | | | | E |
| S1.116 | | K | | K | T | L | C | H | | |
| S1.117 | | K | | K | T | L | C | | M | |
| S1.118 | | K | | K | T | L | C | | | E |
| S1.119 | | K | | K | T | L | | H | | E |
| S1.120 | | K | | K | T | L | | | M | E |
| S1.121 | | K | | K | T | L | C | H | M | E |
| S1.122 | | K | I | K | T | L | | | | |
| S1.123 | | K | I | K | T | L | C | | | |
| S1.124 | | K | I | K | T | L | | H | | |
| S1.125 | | K | I | K | T | L | | | M | |
| S1.126 | | K | I | K | T | L | | | | E |
| S1.127 | | K | I | K | T | L | C | H | | |
| S1.128 | | K | I | K | T | L | C | | M | |
| S1.129 | | K | I | K | T | L | C | | | E |
| S1.130 | | K | I | K | T | L | | H | | E |
| S1.131 | | K | I | K | T | L | | | M | E |
| S1.132 | | K | I | K | T | L | C | H | M | E |
| S1.133 | G | | | K | T | | | | | |
| S1.134 | G | | | K | T | | C | | | |
| S1.135 | G | | | K | T | | | H | | |
| S1.136 | G | | | K | T | | | | M | |
| S1.137 | G | | | K | T | | | | | E |
| S1.138 | G | | | K | T | | C | H | | |
| S1.139 | G | | | K | T | | C | | M | |
| S1.140 | G | | | K | T | | C | | | E |
| S1.141 | G | | | K | T | | | H | | E |
| S1.142 | G | | | K | T | | | | M | E |
| S1.143 | G | | | K | T | | C | H | M | E |
| S1.144 | H | | | K | T | | | | | |
| S1.145 | H | | | K | T | | C | | | |
| S1.146 | H | | | K | T | | | H | | |
| S1.147 | H | | | K | T | | | | M | |
| S1.148 | H | | | K | T | | | | | E |
| S1.149 | H | | | K | T | | C | H | | |
| S1.150 | H | | | K | T | | C | | M | |
| S1.151 | H | | | K | T | | C | | | E |
| S1.152 | H | | | K | T | | | H | | E |
| S1.153 | H | | | K | T | | | | M | E |
| S1.154 | H | | | K | T | | C | H | M | E |
| S1.155 | S | | | | T | | | | | |
| S1.156 | S | | | | T | | C | | | |
| S1.157 | S | | | | T | | | H | | |
| S1.158 | S | | | | T | | | | M | |
| S1.159 | S | | | | T | | | | | E |
| S1.160 | S | | | | T | | C | H | | |
| S1.161 | S | | | | T | | C | | M | |
| S1.162 | S | | | | T | | C | | | E |
| S1.163 | S | | | | T | | | H | | E |
| S1.164 | S | | | | T | | | | M | E |
| S1.165 | S | | | | T | | C | H | M | E |
| S1.166 | | A | | | T | | | | | |
| S1.167 | | A | | | T | | C | | | |
| S1.168 | | A | | | T | | | H | | |
| S1.169 | | A | | | T | | | | M | |
| S1.170 | | A | | | T | | | | | E |
| S1.171 | | A | | | T | | C | H | | |
| S1.172 | | A | | | T | | C | | M | |
| S1.173 | | A | | | T | | C | | | E |
| S1.174 | | A | | | T | | | H | | E |
| S1.175 | | A | | | T | | | | M | E |
| S1.176 | | A | | | T | | C | H | M | E |
| S1.177 | S | | I | | T | | | | | |
| S1.178 | S | | I | | T | | C | | | |
| S1.179 | S | | I | | T | | | H | | |
| S1.180 | S | | I | | T | | | | M | |
| S1.181 | S | | I | | T | | | | | E |
| S1.182 | S | | I | | T | | C | H | | |
| S1.183 | S | | I | | T | | C | | M | |
| S1.184 | S | | I | | T | | C | | | E |
| S1.185 | S | | I | | T | | | H | | E |
| S1.186 | S | | I | | T | | | | M | E |
| S1.187 | S | | I | | T | | C | H | M | E |
| S1.188 | | A | I | | T | L | | | | |
| S1.189 | | A | I | | T | L | C | | | |
| S1.190 | | A | I | | T | L | | H | | |
| S1.191 | | A | I | | T | L | | | M | |
| S1.192 | | A | I | | T | L | | | | E |
| S1.193 | | A | I | | T | L | C | H | | |
| S1.194 | | A | I | | T | L | C | | M | |
| S1.195 | | A | I | | T | L | C | | | E |
| S1.196 | | A | I | | T | L | | H | | E |
| S1.197 | | A | I | | T | L | | | M | E |
| S1.198 | | A | I | | T | L | C | H | M | E |
| S1.199 | S | A | L | K | T | L | C | H | M | E |

TABLE 6.2C
Candidate base editors (CABE-2e; TADAC-2e). Mutations are indicated with reference to variant 1.2 (Table 6.2A).

| Variant | Alternative Variant | Residue identity (START Met is amino acid #1) | | | | | | | | | | | | | | | | | |
|---|---|---|---|---|---|---|---|---|---|---|---|---|---|---|---|---|---|---|---|
| Name | Names | 4 | 6 | 17 | 23 | 76 | 77 | 100 | 111 | 114 | 119 | 122 | 127 | 143 | 147 | 158 | 159 | 162 | 166 |
| Reference | 1.2 (see Table 6.2A) | V | F | T | R | I | D | G | T | A | D | H | N | A | R | A | Q | A | T |
| TadAC2.1 | pDKL-135; 2.1 | K | | | | | | | | C | | | | | | | | | |
| TadAC2.2 | pDKL-136; 2.2 | K | | | | | G | | | | | | | | | | | | |
| TadAC2.3 | pDKL-137; 2.3 | | Y | | | | | A | | | | R | | | | | | | |
| TadAC2.4 | pDKL-138; 2.4 | T | | | | R | | | | | | G | | | | | | | |
| TadAC2.5 | pDKL-139; 2.5 | | Y | | | W | | | | | | | | | | | | | |
| TadAC2.6 | pDKL-140; 2.6 | | Y | | | | | | | | N | | | | | | | | |
| TadAC2.7 | pDKL-141; 2.7 | | Y | | | | | | | C | | | | | | | | | |
| TadAC2.8 | pDKL-142; 2.8 | | Y | | | | | | | | | | | | | | | | |
| TadAC2.9 | pDKL-143; 2.9 | K | | | | W | | | | | | T | | | | | | | |
| TadAC2.10 | pDKL-144; 2.10 | | G | | | R | | K | | | | | | | | | | | |
| TadAC2.11 | pDKL-145; 2.11 | | H | | | | | | | | | N | | | | | | | |
| TadAC2.12 | pDKL-146; 2.12 | | | | | | | | | C | | | | | | | | | |
| TadAC2.13 | pDKL-147; 2.13 | | Y | | | H | | | | | | R | | | | | | | I |
| TadAC2.14 | pDKL-148; 2.14 | | | | | | | | | | | | P | | | | | | |
| TadAC2.15 | pDKL-149; 2.15 | | | | Q | R | | | | | | | | | | | | | |
| TadAC2.16 | pDKL-150; 2.16 | | | | | H | | | | | | R | | | | V | | | |
| TadAC2.17 | pDKL-151; 2.17 | | Y | | | | | | H | | | | | | | | | | |
| TadAC2.18 | pDKL-152; 2.18 | | | | | W | | | | | | | | | | | | | |
| TadAC2.19 | pDKL-153; 2.19 | | | | | | | | H | | | G | | | | | | C | |
| TadAC2.20 | pDKL-154; 2.20 | | | | | | | | | | | | | E | | | | | |
| TadAC2.21 | pDKL-155; 2.21 | | Y | | | R | | | | | | | | | | | | | |
| TadAC2.22 | pDKL-156; 2.22 | | | W | | H | | | | | | G | | | | V | | | |
| TadAC2.23 | pDKL-157; 2.23 | S | | | | Y | | | | | | | | E | | | S | | |
| TadAC2.24 | pDKL-158; 2.24 | | | | | | | | | | | | I | | | | | Q | |

TABLE 6.2D
Rationally Designed Candidate Editors (CBE-Ts; T_{AD}Cs).
Mutations are indicated with reference to ABE8.20m.

| | AA Positions | | | | | | | | | | | | | | |
|---|---|---|---|---|---|---|---|---|---|---|---|---|---|---|---|
| | 6 | 27 | 49 | 76 | 77 | 82 | 107 | 112 | 114 | 115 | 119 | 122 | 127 | 142 | 143 |
| | TadA8.20 | | | | | | | | | | | | | | |
| | F | E | I | Y | D | S | R | G | A | G | D | H | N | A | A |
| S1.154 | F | H | K | Y | D | T | C | H | | M | | | | E | |
| Alterations | Y | | | W | G | | | | C | | N | G | P | | E |
| from Table 6.2C | | | | | | | | | | | | | | | |
| S2.1 | Y | H | K | W | | T | C | H | | M | | | | E | |
| S2.2 | Y | H | K | | G | T | C | H | | M | | | | E | |
| S2.3 | Y | H | K | | | T | C | H | C | M | | | | E | |
| S2.4 | Y | H | K | | | T | C | H | | M | N | | | E | |
| S2.5 | Y | H | K | | | T | C | H | | M | | G | | E | |
| S2.6 | Y | H | K | | | T | C | H | | M | | | P | E | |
| S2.7 | Y | H | K | | | T | C | H | | M | | | | E | E |
| S2.8 | Y | H | K | | | T | C | H | | M | | | | A | E |
| S2.9 | Y | H | K | W | G | T | C | H | | M | | | | E | |
| S2.10 | Y | H | K | W | | T | C | H | C | M | | | | E | |
| S2.11 | Y | H | K | W | | T | C | H | | M | N | | | E | |
| S2.12 | Y | H | K | W | | T | C | H | | M | | G | | E | |
| S2.13 | Y | H | K | W | | T | C | H | | M | | | P | E | |
| S2.14 | Y | H | K | W | | T | C | H | | M | | | | E | E |
| S2.15 | Y | H | K | W | | T | C | H | | M | | | | A | E |
| S2.16 | Y | H | K | | G | T | C | H | C | M | | | | E | |
| S2.17 | Y | H | K | | G | T | C | H | | M | N | | | E | |
| S2.18 | Y | H | K | | G | T | C | H | | M | | G | | E | |
| S2.19 | Y | H | K | | G | T | C | H | | M | | | P | E | |
| S2.20 | Y | H | K | | G | T | C | H | | M | | | | E | E |
| S2.21 | Y | H | K | | G | T | C | H | | M | | | | A | E |
| S2.22 | Y | H | K | | | T | C | H | C | M | N | | | E | |
| S2.23 | Y | H | K | | | T | C | H | C | M | | G | | E | |
| S2.24 | Y | H | K | | | T | C | H | C | M | | | P | E | |
| S2.25 | Y | H | K | | | T | C | H | | M | N | G | | E | |
| S2.26 | Y | H | K | | | T | C | H | | M | N | | P | E | |
| S2.27 | Y | H | K | | | T | C | H | | M | | G | P | E | |
| S2.28 | Y | H | K | W | G | T | C | H | C | M | | | | E | |
| S2.29 | Y | H | K | W | G | T | C | H | | M | N | | | E | |
| S2.30 | Y | H | K | W | G | T | C | H | | M | | G | | E | |
| S2.31 | Y | H | K | W | G | T | C | H | | M | | | P | E | |
| S2.32 | Y | H | K | W | G | T | C | H | | M | | | | E | E |
| S2.33 | Y | H | K | W | G | T | C | H | | M | | | | A | E |
| S2.34 | Y | H | K | W | | T | C | H | C | M | N | | | E | |
| S2.35 | Y | H | K | W | | T | C | H | C | M | | G | | E | |
| S2.36 | Y | H | K | W | | T | C | H | C | M | | | P | E | |
| S2.37 | Y | H | K | W | | T | C | H | C | M | | | | E | E |
| S2.38 | Y | H | K | W | | T | C | H | C | M | | | | A | E |
| S2.39 | Y | H | K | W | | T | C | H | | M | N | G | | E | |
| S2.40 | Y | H | K | W | | T | C | H | | M | N | | P | E | |
| S2.41 | Y | H | K | W | | T | C | H | | M | | G | P | E | |
| S2.42 | Y | H | K | W | | T | C | H | C | M | N | G | | E | |
| S2.43 | Y | H | K | W | | T | C | H | C | M | N | | P | E | |
| S2.44 | Y | H | K | W | | T | C | H | C | M | | G | P | E | |
| S2.45 | Y | H | K | W | G | T | C | H | C | M | N | | | E | |
| S2.46 | Y | H | K | W | G | T | C | H | C | M | | G | | E | |
| S2.47 | Y | H | K | W | G | T | C | H | C | M | | | P | E | |
| S2.48 | Y | H | K | W | G | T | C | H | C | M | | | | E | E |
| S2.49 | Y | H | K | W | G | T | C | H | C | M | | | | A | E |
| S2.50 | Y | H | K | W | G | T | C | H | C | M | N | G | | E | |
| S2.51 | Y | H | K | W | G | T | C | H | C | M | N | | P | E | |
| S2.52 | Y | H | K | W | G | T | C | H | C | M | | G | P | E | |
| S2.53 | Y | H | K | W | | T | C | H | C | M | N | G | P | E | E |
| S2.54 | Y | H | K | W | | T | C | H | C | M | N | G | P | A | E |
| S2.55 | Y | H | K | W | G | T | C | H | C | M | N | G | P | E | E |
| S2.56 | Y | H | K | W | G | T | C | H | C | M | N | G | P | A | E |

TABLE 6.2E
Hybrid constructs. Mutations are indicated with reference to ABE7.10.

| | TadA amino acid subsitutions | | | | | | | | | | | |
|---|---|---|---|---|---|---|---|---|---|---|---|---|
| | 76 | 82 | 109 | 111 | 119 | 122 | 123 | 147 | 149 | 154 | 166 | 167 |
| ABE7.10 | I | V | A | T | D | H | Y | Y | F | Q | T | D |
| ABE8e | | | S | R | N | N | | D | Y | | I | N |
| ABE8.20 | Y | S | | | | | H | R | | R | | |
| ABE8.17 | | S | | | | | | | | R | | |
| pNMG- | Y | S | | | | | H | D | | R | | |
| B878 | | | | | | | | | | | | |
| pNMG- | Y | S | | | | | H | R | Y | R | | |
| B879 | | | | | | | | | | | | |
| pNMG- | Y | S | | | | | H | R | | R | I | |
| B880 | | | | | | | | | | | | |
| pNMG- | Y | S | | | | | H | R | | R | | N |
| B881 | | | | | | | | | | | | |
| pNMG- | Y | S | | | | | H | D | Y | R | I | N |
| B882 | | | | | | | | | | | | |
| pNMG- | Y | S | | R | N | | H | R | | R | | |
| B883 | | | | | | | | | | | | |
| pNMG- | Y | S | S | R | N | N | H | R | | R | | |
| B884 | | | | | | | | | | | | |
| pNMG- | Y | S | S | | | | H | R | | R | | |
| B885 | | | | | | | | | | | | |
| pNMG- | Y | S | | R | | | H | R | | R | | |
| B886 | | | | | | | | | | | | |
| pNMG- | Y | S | | | N | | H | R | | R | | |
| B887 | | | | | | | | | | | | |
| pNMG- | Y | S | | | | N | H | R | | R | | |
| B888 | | | | | | | | | | | | |
| pNMG- | Y | S | S | R | | | H | R | | R | | |
| B889 | | | | | | | | | | | | |
| pNMG- | Y | S | | | N | N | H | R | | R | | |
| B890 | | | | | | | | | | | | |
| pNMG- | Y | S | S | R | N | N | H | D | Y | R | I | N |
| B891 | | | | | | | | | | | | |

TABLE 6.2F
Base editor variants. Mutations are indicated with reference to ABE8.19m/8.20m.

| AA positions: | 17 | 27 | 48 | 49 | 76 | 82 | 84 | 118 | 142 | 147 | 149 | 166 | 167 |
|---|---|---|---|---|---|---|---|---|---|---|---|---|---|
| ABE8.19m/8.20m | T | E | A | I | Y/I | S | F | M | A | Y | F | T | D |
| 1.1 + 8e(B879) | | H | | | I | | M | | | | Y | | |
| 1.2 + 8e(B879) | | H | | K | I | | | | | | Y | | |
| 1.12 + 8e(B879) | A | H | | M | I | | | L | | | Y | | |
| 1.17 + 8e(B879) | A | | G | | | T | | | E | | Y | | |
| 1.18 + 8e(B879) | | G | | | | | | | | | Y | | |
| 1.19 + 8e(B879) | | G | | N | | | | | | | Y | | |
| 1.1 + 8e(B882) | | H | | | I | | M | | | D | Y | I | N |
| 1.2 + 8e(B882) | | H | | K | I | | | | | D | Y | I | N |
| 1.12 + 8e(B882) | A | H | | M | I | | | L | | D | Y | I | N |
| 1.17 + 8e(B882) | A | | G | | | T | | | E | D | Y | I | N |
| 1.18 + 8e(B882) | | G | | | | | | | | D | Y | I | N |
| 1.19 + 8e(B882) | | G | | N | | | | | | D | Y | I | N |

### Guide Polynucleotides

[0546] A polynucleotide programmable nucleotide binding domain, when in conjunction with a bound guide polynucleotide (e.g., gRNA), can specifically bind to a target polynucleotide sequence (i.e., via complementary base pairing between bases of the bound guide nucleic acid and bases of the target polynucleotide sequence) and thereby localize the base editor to the target nucleic acid sequence desired to be edited. In some embodiments, the target polynucleotide sequence comprises single-stranded DNA or double-stranded DNA. In some embodiments, the target polynucleotide sequence comprises RNA. In some embodiments, the target polynucleotide sequence comprises a DNA-RNA hybrid.

[0547] CRISPR is an adaptive immune system that provides protection against mobile genetic elements (viruses, transposable elements and conjugative plasmids). CRISPR clusters contain spacers, sequences complementary to antecedent mobile elements, and target invading nucleic acids. CRISPR clusters are transcribed and processed into CRISPR RNA (crRNA). In type II CRISPR systems, correct processing of pre-crRNA requires a trans-encoded small RNA (tracrRNA), endogenous ribonuclease 3 (rnc) and a Cas9 protein. The tracrRNA serves as a guide for ribonuclease 3-aided processing of pre-crRNA. Subsequently, Cas9/crRNA/tracrRNA endonucleolytically cleaves linear or circular dsDNA target complementary to the spacer. The target strand not complementary to crRNA is first cut endonucleolytically, and then trimmed 3′-5′ exonucleolytically. In nature, DNA-binding and cleavage typically requires protein and both RNAs. However, single guide RNAs (“sgRNA”, or simply “gRNA”) can be engineered so as to incorporate aspects of both the crRNA and tracrRNA into a single RNA species. See, e.g., Jinek M., et al. Science 337:816-821(2012), the entire contents of which is hereby incorporated by reference. Cas9 recognizes a short motif in the CRISPR repeat sequences (the PAM or protospacer adjacent motif) to help distinguish self versus non-self. See e.g., “Complete genome sequence of an M1 strain of Streptococcus pyogenes.” Ferretti, J. J. et al., Natl. Acad. Sci. U.S.A. 98:4658-4663(2001); “CRISPR RNA maturation by trans-encoded small RNA and host factor RNase III.” Deltcheva E. et al., Nature 471:602-607(2011); and “Programmable dual-RNA-guided DNA endonuclease in adaptive bacterial immunity.” Jinek M. et al, Science 337:816-821(2012), the entire contents of each of which are incorporated herein by reference).

[0548] The PAM sequence can be any PAM sequence known in the art. Suitable PAM sequences include, but are not limited to, NGG, NGA, NGC, NGN, NGT, NGCG, NGAG, NGAN, NGNG, NGCN, NGCG, NGTN, NNGRRT, NNNRRT, NNGRR(N), TTTV, TYCV, TYCV, TATV, NNNNGATT, NNAGAAW, or NAAAAC. Y is a pyrimidine; N is any nucleotide base; W is A or T.

[0549] In an embodiment, a guide polynucleotide described herein can be RNA or DNA. In one embodiment, the guide polynucleotide is a gRNA. An RNA/Cas complex can assist in “guiding” a Cas protein to a target DNA. Cas9/crRNA/tracrRNA endonucleolytically cleaves linear or circular dsDNA target complementary to the spacer. The target strand not complementary to crRNA is first cut endonucleolytically, then trimmed 3′-5′ exonucleolytically. In nature, DNA-binding and cleavage typically requires protein and both RNAs. However, single guide RNAs (“sgRNA”, or simply “gRNA”) can be engineered so as to incorporate aspects of both the crRNA and tracrRNA into a single RNA species. See, e.g., Jinek M. et al., Science 337:816-821(2012), the entire contents of which is hereby incorporated by reference.

[0550] In some embodiments, the guide polynucleotide is at least one single guide RNA (“sgRNA” or “gRNA”). In some embodiments, a guide polynucleotide comprises two or more individual polynucleotides, which can interact with one another via for example complementary base pairing (e.g., a dual guide polynucleotide, dual gRNA). For example, a guide polynucleotide can comprise a CRISPR RNA (crRNA) and a trans-activating CRISPR RNA (tracrRNA) or can comprise one or more trans-activating CRISPR RNA (tracrRNA).

[0551] In some embodiments, the guide polynucleotide is at least one tracrRNA. In some embodiments, the guide polynucleotide does not require PAM sequence to guide the polynucleotide-programmable DNA-binding domain (e.g., Cas9 or Cpf1) to the target nucleotide sequence.

[0552] A guide polynucleotide may include natural or non-natural (or unnatural) nucleotides (e.g., peptide nucleic acid or nucleotide analogs). In some cases, the targeting region of a guide nucleic acid sequence can be at least 15, 16, 17, 18, 19, 20, 21, 22, 23, 24, 25, 26, 27, 28, 29, or 30 nucleotides in length. A targeting region of a guide nucleic acid can be between 10-30 nucleotides in length, or between 15-25 nucleotides in length, or between 15-20 nucleotides in length.

[0553] In some embodiments, the base editor provided herein utilizes one or more guide polynucleotide (e.g., multiple gRNA). In some embodiments, a single guide polynucleotide is utilized for different base editors described herein. For example, a single guide polynucleotide can be utilized for a cytidine base editor and an adenosine base editor.

[0554] In some embodiments, the methods described herein can utilize an engineered Cas protein. A guide RNA (gRNA) is a short synthetic RNA composed of a scaffold sequence necessary for Cas-binding and a user-defined ˜20 nucleotide spacer that defines the genomic target to be modified. Exemplary gRNA scaffold sequences are provided in the sequence listing as SEQ ID NOs: 317-327 and 425. Thus, a skilled artisan can change the genomic target of the Cas protein specificity is partially determined by how specific the gRNA targeting sequence is for the genomic target compared to the rest of the genome.

[0555] In other embodiments, a guide polynucleotide comprises both the polynucleotide targeting portion of the nucleic acid and the scaffold portion of the nucleic acid in a single molecule (i.e., a single-molecule guide nucleic acid). For example, a single-molecule guide polynucleotide can be a single guide RNA (sgRNA or gRNA). Herein the term guide polynucleotide sequence contemplates any single, dual or multi-molecule nucleic acid capable of interacting with and directing a base editor to a target polynucleotide sequence.

[0556] Typically, a guide polynucleotide (e.g., crRNA/trRNA complex or a gRNA) comprises a “polynucleotide-targeting segment” that includes a sequence capable of recognizing and binding to a target polynucleotide sequence, and a “protein-binding segment” that stabilizes the guide polynucleotide within a polynucleotide programmable nucleotide binding domain component of a base editor. In some embodiments, the polynucleotide targeting segment of the guide polynucleotide recognizes and binds to a DNA polynucleotide, thereby facilitating the editing of a base in DNA. In other cases, the polynucleotide targeting segment of the guide polynucleotide recognizes and binds to an RNA polynucleotide, thereby facilitating the editing of a base in RNA. Herein a “segment” refers to a section or region of a molecule, e.g., a contiguous stretch of nucleotides in the guide polynucleotide. A segment can also refer to a region/section of a complex such that a segment can comprise regions of more than one molecule. For example, where a guide polynucleotide comprises multiple nucleic acid molecules, the protein-binding segment of can include all or a portion (e.g., a functional portion) of multiple separate molecules that are for instance hybridized along a region of complementarity. In some embodiments, a protein-binding segment of a DNA-targeting RNA that comprises two separate molecules comprises (i) base pairs 40-75 of a first RNA molecule that is 100 base pairs in length; and (ii) base pairs 10-25 of a second RNA molecule that is 50 base pairs in length. The definition of “segment,” unless otherwise specifically defined in a particular context, is not limited to a specific number of total base pairs, is not limited to any particular number of base pairs from a given RNA molecule, is not limited to a particular number of separate molecules within a complex and can include regions of RNA molecules that are of any total length and can include regions with complementarity to other molecules.

[0557] The guide polynucleotides can be synthesized chemically, synthesized enzymatically, or a combination thereof. For example, the gRNA can be synthesized using standard phosphoramidite-based solid-phase synthesis methods. Alternatively, the gRNA can be synthesized in vitro by operably linking DNA encoding the gRNA to a promoter control sequence that is recognized by a phage RNA polymerase. Examples of suitable phage promoter sequences include T7, T3, SP6 promoter sequences, or variations thereof. In embodiments in which the gRNA comprises two separate molecules (e.g., crRNA and tracrRNA), the crRNA can be chemically synthesized and the tracrRNA can be enzymatically synthesized.

[0558] A guide polynucleotide may be expressed, for example, by a DNA that encodes the gRNA, e.g., a DNA vector comprising a sequence encoding the gRNA. The gRNA may be encoded alone or together with an encoded base editor. Such DNA sequences may be introduced into an expression system, e.g., a cell, together or separately. For example, DNA sequences encoding a polynucleotide programmable nucleotide binding domain and a gRNA may be introduced into a cell, each DNA sequence can be part of a separate molecule (e.g., one vector containing the polynucleotide programmable nucleotide binding domain coding sequence and a second vector containing the gRNA coding sequence) or both can be part of a same molecule (e.g., one vector containing coding (and regulatory) sequence for both the polynucleotide programmable nucleotide binding domain and the gRNA). An RNA can be transcribed from a synthetic DNA molecule, e.g., a gBlocks® gene fragment. A gRNA molecule can be transcribed in vitro.

[0559] A gRNA or a guide polynucleotide can comprise three regions: a first region at the 5′ end that can be complementary to a target site in a chromosomal sequence, a second internal region that can form a stem loop structure, and a third 3′ region that does not form a secondary structure or bind a target site. A first region of each gRNA can also be different such that each gRNA guides a fusion protein or complex to a specific target site. Further, second and third regions of each gRNA can be identical in all gRNAs.

[0560] A first region of a gRNA or a guide polynucleotide can be complementary to sequence at a target site in a chromosomal sequence such that the first region of the gRNA can base pair with the target site. In some cases, a first region of a gRNA comprises from or from about 10 nucleotides to 25 nucleotides (i.e., from 10 nucleotides to nucleotides; or from about 10 nucleotides to about 25 nucleotides; or from 10 nucleotides to about 25 nucleotides; or from about 10 nucleotides to 25 nucleotides) or more. For example, a region of base pairing between a first region of a gRNA and a target site in a chromosomal sequence can be or can be about 10, 11, 12, 13, 14, 15, 16, 17, 18, 19, 20, 22, 23, 24, 25, or more nucleotides in length. Sometimes, a first region of a gRNA can be or can be about 19, 20, or 21 nucleotides in length.

[0561] A gRNA or a guide polynucleotide can also comprise a second region that forms a secondary structure. For example, a secondary structure formed by a gRNA can comprise a stem (or hairpin) and a loop. A length of a loop and a stem can vary. For example, a loop can range from or from about 3 to 10 nucleotides in length, and a stem can range from or from about 6 to 20 base pairs in length. A stem can comprise one or more bulges of 1 to 10 or about 10 nucleotides. The overall length of a second region can range from or from about 16 to 60 nucleotides in length. For example, a loop can be or can be about 4 nucleotides in length and a stem can be or can be about 12 base pairs.

[0562] A gRNA or a guide polynucleotide can also comprise a third region at the 3′ end that can be essentially single-stranded. For example, a third region is sometimes not complementarity to any chromosomal sequence in a cell of interest and is sometimes not complementarity to the rest of a gRNA. Further, the length of a third region can vary. A third region can be more than or more than about 4 nucleotides in length. For example, the length of a third region can range from or from about 5 to 60 nucleotides in length.

[0563] A gRNA or a guide polynucleotide can target any exon or intron of a gene target. In some cases, a guide can target Exon 1 or 2 of a gene, in other cases; a guide can target Exon 3 or 4 of a gene. In some embodiments, a composition comprises multiple gRNAs that all target the same exon or multiple gRNAs that target different exons. An exon and/or an intron of a gene can be targeted.

[0564] A gRNA or a guide polynucleotide can target a nucleic acid sequence of about 20 nucleotides or less than about 20 nucleotides (e.g., at least about 5, 10, 15, 16, 17, 18, 19, 20, 21, 22, 23, 24, 25, 30 nucleotides), or anywhere between about 1-100 nucleotides (e.g., 5, 10, 15, 16, 17, 18, 19, 20, 21, 22, 23, 24, 25, 30, 40, 50, 60, 70, 80, 90, 100). A target nucleic acid sequence can be or can be about 20 bases immediately 5′ of the first nucleotide of the PAM. A gRNA can target a nucleic acid sequence. A target nucleic acid can be at least or at least about 1-10, 1-20, 1-30, 1-40, 1-50, 1-60, 1-70, 1-80, 1-90, or 1-100 nucleotides.

[0565] Methods for selecting, designing, and validating guide polynucleotides, e.g., gRNAs and targeting sequences are described herein and known to those skilled in the art. For example, to minimize the impact of potential substrate promiscuity of a deaminase domain in the nucleobase editor system (e.g., an AID domain), the number of residues that could unintentionally be targeted for deamination (e.g., off-target C residues that could potentially reside on single strand DNA within the target nucleic acid locus) may be minimized. In addition, software tools can be used to optimize the gRNAs corresponding to a target nucleic acid sequence, e.g., to minimize total off-target activity across the genome. For example, for each possible targeting domain choice using S. pyogenes Cas9, all off-target sequences (preceding selected PAMs, e.g., NAG or NGG) may be identified across the genome that contain up to certain number (e.g., 1, 2, 3, 4, 5, 6, 7, 8, 9, or 10) of mismatched base-pairs. First regions of gRNAs complementary to a target site can be identified, and all first regions (e.g., crRNAs) can be ranked according to its total predicted off-target score; the top-ranked targeting domains represent those that are likely to have the greatest on-target and the least off-target activity. Candidate targeting gRNAs can be functionally evaluated by using methods known in the art and/or as set forth herein.

[0566] As a non-limiting example, target DNA hybridizing sequences in crRNAs of a gRNA for use with Cas9s may be identified using a DNA sequence searching algorithm. gRNA design is carried out using custom gRNA design software based on the public tool cas-OFFinder as described in Bae S., Park J., & Kim J.-S. Cas-OFFinder: A fast and versatile algorithm that searches for potential off-target sites of Cas9 RNA-guided endonucleases. Bioinformatics 30, 1473-1475 (2014). This software scores guides after calculating their genome-wide off-target propensity. Typically matches ranging from perfect matches to 7 mismatches are considered for guides ranging in length from 17 to 24. Once the off-target sites are computationally-determined, an aggregate score is calculated for each guide and summarized in a tabular output using a web-interface. In addition to identifying potential target sites adjacent to PAM sequences, the software also identifies all PAM adjacent sequences that differ by 1, 2, 3 or more than 3 nucleotides from the selected target sites. Genomic DNA sequences for a target nucleic acid sequence, e.g., a target gene may be obtained and repeat elements may be screened using publicly available tools, for example, the RepeatMasker program. RepeatMasker searches input DNA sequences for repeated elements and regions of low complexity. The output is a detailed annotation of the repeats present in a given query sequence.

[0567] Following identification, first regions of gRNAs, e.g., crRNAs, are ranked into tiers based on their distance to the target site, their orthogonality and presence of 5′ nucleotides for close matches with relevant PAM sequences (for example, a 5′ G based on identification of close matches in the human genome containing a relevant PAM e.g., NGG PAM for S. pyogenes, NNGRRT or NNGRRV PAM for S. aureus). As used herein, orthogonality refers to the number of sequences in the human genome that contain a minimum number of mismatches to the target sequence. A “high level of orthogonality” or “good orthogonality” may, for example, refer to 20-mer targeting domains that have no identical sequences in the human genome besides the intended target, nor any sequences that contain one or two mismatches in the target sequence. Targeting domains with good orthogonality may be selected to minimize off-target DNA cleavage.

[0568] A gRNA can then be introduced into a cell or embryo as an RNA molecule or a non-RNA nucleic acid molecule, e.g., DNA molecule. In one embodiment, a DNA encoding a gRNA is operably linked to promoter control sequence for expression of the gRNA in a cell or embryo of interest. A RNA coding sequence can be operably linked to a promoter sequence that is recognized by RNA polymerase III (Pol III). Plasmid vectors that can be used to express gRNA include, but are not limited to, px330 vectors and px333 vectors. In some cases, a plasmid vector (e.g., px333 vector) comprises at least two gRNA-encoding DNA sequences. Further, a vector can comprise additional expression control sequences (e.g., enhancer sequences, Kozak sequences, polyadenylation sequences, transcriptional termination sequences, etc.), selectable marker sequences (e.g., GFP or antibiotic resistance genes such as puromycin), origins of replication, and the like. A DNA molecule encoding a gRNA can also be linear. A DNA molecule encoding a gRNA or a guide polynucleotide can also be circular.

[0569] In some embodiments, a reporter system is used for detecting base-editing activity and testing candidate guide polynucleotides. In some embodiments, a reporter system comprises a reporter gene based assay where base editing activity leads to expression of the reporter gene. For example, a reporter system may include a reporter gene comprising a deactivated start codon, e.g., a mutation on the template strand from 3′-TAC-5′ to 3′-CAC-5′. Upon successful deamination of the target C, the corresponding mRNA will be transcribed as 5′-AUG-3′ instead of 5′-GUG-3′, enabling the translation of the reporter gene. Suitable reporter genes will be apparent to those of skill in the art. Non-limiting examples of reporter genes include gene encoding green fluorescence protein (GFP), red fluorescence protein (RFP), luciferase, secreted alkaline phosphatase (SEAP), or any other gene whose expression are detectable and apparent to those skilled in the art. The reporter system can be used to test many different gRNAs, e.g., in order to determine which residue(s) with respect to the target DNA sequence the respective deaminase will target. sgRNAs that target non-template strand can also be tested in order to assess off-target effects of a specific base editing protein, e.g., a Cas9 deaminase fusion protein or complex. In some embodiments, such gRNAs can be designed such that the mutated start codon will not be base-paired with the gRNA. The guide polynucleotides can comprise standard ribonucleotides, modified ribonucleotides (e.g., pseudouridine), ribonucleotide isomers, and/or ribonucleotide analogs. In some embodiments, the guide polynucleotide comprises at least one detectable label. The detectable label can be a fluorophore (e.g., FAM, TMR, Cy3, Cy5, Texas Red, Oregon Green, Alexa Fluors, Halo tags, or suitable fluorescent dye), a detection tag (e.g., biotin, digoxigenin, and the like), quantum dots, or gold particles.

[0570] In some embodiments, a base editor system may comprise multiple guide polynucleotides, e.g., gRNAs. For example, the gRNAs may target to one or more target loci (e.g., at least 1 gRNA, at least 2 gRNA, at least 5 gRNA, at least 10 gRNA, at least 20 gRNA, at least 30 g RNA, at least 50 gRNA) comprised in a base editor system. The multiple gRNA sequences can be tandemly arranged and are preferably separated by a direct repeat.

### Modified Polynucleotides

[0571] To enhance expression, stability, and/or genomic/base editing efficiency, and/or reduce possible toxicity, the base editor-coding sequence (e.g., mRNA) and/or the guide polynucleotide (e.g., gRNA) can be modified to include one or more modified nucleotides and/or chemical modifications, e.g. using pseudo-uridine, 5-Methyl-cytosine, 2′-O-methyl-3′-phosphonoacetate, 2′-O-methyl thioPACE (MSP), 2′-O-methyl-PACE (MP), 2′-fluoro RNA (2′-F-RNA), =constrained ethyl (S-cEt), 2′-O-methyl (‘M’), 2′-O-methyl-3′-phosphorothioate (‘MS’), 2′-O-methyl-3′-thiophosphonoacetate (‘MSP’), 5-methoxyuridine, phosphorothioate, and N1-Methylpseudouridine. Chemically protected gRNAs can enhance stability and editing efficiency in vivo and ex vivo. Methods for using chemically modified mRNAs and guide RNAs are known in the art and described, for example, by Jiang et al., Chemical modifications of adenine base editor mRNA and guide RNA expand its application scope. Nat Commun 11, 1979 (2020). doi.org/10.1038/s41467-020-15892-8, Callum et al., N1-Methylpseudouridine substitution enhances the performance of synthetic mRNA switches in cells, Nucleic Acids Research, Volume 48, Issue 6, 6 Apr. 2020, Page e35, and Andries et al., Journal of Controlled Release, Volume 217, 10 Nov. 2015, Pages 337-344, each of which is incorporated herein by reference in its entirety.

[0572] In a particular embodiment, the chemical modifications are 2′-O-methyl (2′-OMe) modifications. The modified guide RNAs may improve saCas9 efficacy and also specificity. The effect of an individual modification varies based on the position and combination of chemical modifications used as well as the inter- and intramolecular interactions with other modified nucleotides. By way of example, S-cEt has been used to improve oligonucleotide intramolecular folding.

[0573] In some embodiments, the guide polynucleotide comprises one or more modified nucleotides at the 5′ end and/or the 3′ end of the guide. In some embodiments, the guide polynucleotide comprises two, three, four or more modified nucleosides at the 5′ end and/or the 3′ end of the guide. In some embodiments, the guide polynucleotide comprises two, three, four or more modified nucleosides at the 5′ end and/or the 3′ end of the guide. In some embodiments, the guide polynucleotide comprises four modified nucleosides at the 5′ end and four modified nucleosides at the 3′ end of the guide. In some embodiments, the modified nucleoside comprises a 2′ O-methyl or a phosphorothioate.

[0574] In some embodiments, the guide comprises at least about 50%-75% modified nucleotides. In some embodiments, the guide comprises at least about 85% or more modified nucleotides. In some embodiments, at least about 1-5 nucleotides at the 5′ end of the gRNA are modified and at least about 1-5 nucleotides at the 3′ end of the gRNA are modified. In some embodiments, at least about 3-5 contiguous nucleotides at each of the 5′ and 3′ termini of the gRNA are modified. In some embodiments, at least about 20% of the nucleotides present in a direct repeat or anti-direct repeat are modified. In some embodiments, at least about 50% of the nucleotides present in a direct repeat or anti-direct repeat are modified. In some embodiments, at least about 50-75% of the nucleotides present in a direct repeat or anti-direct repeat are modified. In some embodiments, at least about 100 of the nucleotides present in a direct repeat or anti-direct repeat are modified. In some embodiments, at least about 20% or more of the nucleotides present in a hairpin present in the gRNA scaffold are modified. In some embodiments, at least about 50% or more of the nucleotides present in a hairpin present in the gRNA scaffold are modified. In some embodiments, the guide comprises a variable length spacer. In some embodiments, the guide comprises a 20-40 nucleotide spacer. In some embodiments, the guide comprises a spacer comprising at least about 20-25 nucleotides or at least about 30-35 nucleotides. In some embodiments, the spacer comprises modified nucleotides. In some embodiments, the guide comprises two or more of the following:
[0575] at least about 1-5 nucleotides at the 5′ end of the gRNA are modified and at least about 1-5 nucleotides at the 3′ end of the gRNA are modified;
[0576] at least about 20% of the nucleotides present in a direct repeat or anti-direct repeat are modified;
[0577] at least about 50-75% of the nucleotides present in a direct repeat or anti-direct repeat are modified;
[0578] at least about 20% or more of the nucleotides present in a hairpin present in the gRNA scaffold are modified;
[0579] a variable length spacer; and
[0580] a spacer comprising modified nucleotides.

[0581] In embodiments, the gRNA contains numerous modified nucleotides and/or chemical modifications (“heavy mods”). Such heavy mods can increase base editing ˜2 fold in vivo or in vitro. For such modifications, mN=2′-OMe; Ns=phosphorothioate (PS), where “N” represents the any nucleotide, as would be understood by one having skill in the art. In some cases, a nucleotide (N) may contain two modifications, for example, both a 2′-OMe and a PS modification. For example, a nucleotide with a phosphorothioate and 2′ OMe is denoted as “mNs;” when there are two modifications next to each other, the notation is “mNsmNs.

[0582] In some embodiments of the modified gRNA, the gRNA comprises one or more chemical modifications selected from the group consisting of 2′-O-methyl (2′-OMe), phosphorothioate (PS), 2′-O-methyl thioPACE (MSP), 2′-O-methyl-PACE (MP), 2′-O-methyl thioPACE (MSP), 2′-fluoro RNA (2′-F-RNA), and constrained ethyl (S-cEt). In embodiments, the gRNA comprises 2′-O-methyl or phosphorothioate modifications. In an embodiment, the gRNA comprises 2′-O-methyl and phosphorothioate modifications. In an embodiment, the modifications increase base editing by at least about 2 fold.

[0583] A guide polynucleotide can comprise one or more modifications to provide a nucleic acid with a new or enhanced feature. A guide polynucleotide can comprise a nucleic acid affinity tag. A guide polynucleotide can comprise synthetic nucleotide, synthetic nucleotide analog, nucleotide derivatives, and/or modified nucleotides.

[0584] In some cases, a gRNA or a guide polynucleotide can comprise modifications. A modification can be made at any location of a gRNA or a guide polynucleotide. More than one modification can be made to a single gRNA or a guide polynucleotide. A gRNA or a guide polynucleotide can undergo quality control after a modification. In some cases, quality control can include PAGE, HPLC, MS, or any combination thereof.

[0585] A modification of a gRNA or a guide polynucleotide can be a substitution, insertion, deletion, chemical modification, physical modification, stabilization, purification, or any combination thereof.

[0586] A gRNA or a guide polynucleotide can also be modified by 5′ adenylate, 5′ guanosine-triphosphate cap, 5′ N7-Methylguanosine-triphosphate cap, 5′ triphosphate cap, 3′ phosphate, 3′ thiophosphate, 5′ phosphate, 5′ thiophosphate, Cis-Syn thymidine dimer, trimers, C12 spacer, C3 spacer, C6 spacer, dSpacer, PC spacer, rSpacer, Spacer 18, Spacer 9, 3′-3′ modifications, 2′-O-methyl thioPACE (MSP), 2′-O-methyl-PACE (MP), and constrained ethyl (S-cEt), 5′-5′ modifications, abasic, acridine, azobenzene, biotin, biotin BB, biotin TEG, cholesteryl TEG, desthiobiotin TEG, DNP TEG, DNP-X, DOTA, dT-Biotin, dual biotin, PC biotin, psoralen C2, psoralen C6, TINA, 3′ DABCYL, black hole quencher 1, black hole quencher 2, DABCYL SE, dT-DABCYL, IRDye QC-1, QSY-21, QSY-35, QSY-7, QSY-9, carboxyl linker, thiol linkers, 2′-deoxyribonucleoside analog purine, 2′-deoxyribonucleoside analog pyrimidine, ribonucleoside analog, 2′-O-methyl ribonucleoside analog, sugar modified analogs, wobble/universal bases, fluorescent dye label, 2′-fluoro RNA, 2′-O-methyl RNA, methylphosphonate, phosphodiester DNA, phosphodiester RNA, phosphothioate DNA, phosphorothioate RNA, UNA, pseudouridine-5′-triphosphate, 5′-methylcytidine-5′-triphosphate, or any combination thereof.

[0587] In some cases, a modification is permanent. In other cases, a modification is transient. In some cases, multiple modifications are made to a gRNA or a guide polynucleotide. A gRNA or a guide polynucleotide modification can alter physiochemical properties of a nucleotide, such as their conformation, polarity, hydrophobicity, chemical reactivity, base-pairing interactions, or any combination thereof.

[0588] A guide polynucleotide can be transferred into a cell by transfecting the cell with an isolated gRNA or a plasmid DNA comprising a sequence coding for the guide RNA and a promoter. A gRNA or a guide polynucleotide can also be transferred into a cell in other way, such as using virus-mediated gene delivery. A gRNA or a guide polynucleotide can be isolated. For example, a gRNA can be transfected in the form of an isolated RNA into a cell or organism. A gRNA can be prepared by in vitro transcription using any in vitro transcription system known in the art. A gRNA can be transferred to a cell in the form of isolated RNA rather than in the form of plasmid comprising encoding sequence for a gRNA.

[0589] A modification can also be a phosphorothioate substitute. In some cases, a natural phosphodiester bond can be susceptible to rapid degradation by cellular nucleases and; a modification of internucleotide linkage using phosphorothioate (PS) bond substitutes can be more stable towards hydrolysis by cellular degradation. A modification can increase stability in a gRNA or a guide polynucleotide. A modification can also enhance biological activity. In some cases, a phosphorothioate enhanced RNA gRNA can inhibit RNase A, RNase T1, calf serum nucleases, or any combinations thereof. These properties can allow the use of PS-RNA gRNAs to be used in applications where exposure to nucleases is of high probability in vivo or in vitro. For example, phosphorothioate (PS) bonds can be introduced between the last 3-5 nucleotides at the 5′- or 3′-end of a gRNA which can inhibit exonuclease degradation. In some cases, phosphorothioate bonds can be added throughout an entire gRNA to reduce attack by endonucleases.

[0590] In some embodiments, the guide RNA is designed such that base editing results in disruption of a splice site (i.e., a splice acceptor (SA) or a splice donor (SD)). In some embodiments, the guide RNA is designed such that the base editing results in a premature STOP codon.

### Protospacer Adjacent Motif

[0591] The term “protospacer adjacent motif (PAM)” or PAM-like motif refers to a 2-6 base pair DNA sequence immediately following the DNA sequence targeted by the Cas9 nuclease in the CRISPR bacterial adaptive immune system. In some embodiments, the PAM can be a 5′ PAM (i.e., located upstream of the 5′ end of the protospacer). In other embodiments, the PAM can be a 3′ PAM (i.e., located downstream of the 5′ end of the protospacer). The PAM sequence is essential for target binding, but the exact sequence depends on a type of Cas protein. The PAM sequence can be any PAM sequence known in the art. Suitable PAM sequences include, but are not limited to, NGG, NGA, NGC, NGN, NGT, NGTT, NGCG, NGAG, NGAN, NGNG, NGCN, NGCG, NGTN, NNGRRT, NNNRRT, NNGRR(N), TTTV, TYCV, TYCV, TATV, NNNNGATT, NNAGAAW, or NAAAAC. Y is a pyrimidine; N is any nucleotide base; W is A or T.

[0592] A base editor provided herein can comprise a CRISPR protein-derived domain that is capable of binding a nucleotide sequence that contains a canonical or non-canonical protospacer adjacent motif (PAM) sequence. A PAM site is a nucleotide sequence in proximity to a target polynucleotide sequence. Some aspects of the disclosure provide for base editors comprising all or a portion (e.g., a functional portion) of CRISPR proteins that have different PAM specificities.

[0593] For example, typically Cas9 proteins, such as Cas9 from S. pyogenes (spCas9), require a canonical NGG PAM sequence to bind a particular nucleic acid region, where the “N” in “NGG” is adenine (A), thymine (T), guanine (G), or cytosine (C), and the G is guanine. A PAM can be CRISPR protein-specific and can be different between different base editors comprising different CRISPR protein-derived domains. A PAM can be 5′ or 3′ of a target sequence. A PAM can be upstream or downstream of a target sequence. A PAM can be 1, 2, 3, 4, 5, 6, 7, 8, 9, 10 or more nucleotides in length. Often, a PAM is between 2-6 nucleotides in length.

[0594] In some embodiments, the PAM is an “NRN” PAM where the “N” in “NRN” is adenine (A), thymine (T), guanine (G), or cytosine (C), and the R is adenine (A) or guanine (G); or the PAM is an “NYN” PAM, wherein the “N” in NYN is adenine (A), thymine (T), guanine (G), or cytosine (C), and the Y is cytidine (C) or thymine (T), for example, as described in R. T. Walton et al., 2020, Science, 10.1126/science.aba8853 (2020), the entire contents of which are incorporated herein by reference.

[0595] Several PAM variants are described in Table 7 below.

TABLE 7
Cas9 proteins and corresponding PAM sequences

| Variant | PAM |
|---|---|
| spCas9 | NGG |
| spCas9-VRQR | NGA |
| spCas9-VRER | NGCG |
| xCas9 (sp) | NGN |
| saCas9 | NNGRRT |
| saCas9-KKH | NNNRRT |
| spCas9-MQKSER | NGCG |
| spCas9-MQKSER | NGCN |
| spCas9-LRKIQK | NGTN |
| spCas9-LRVSQK | NGTN |
| spCas9-LRVSQL | NGTN |
| spCas9-MQKFRAER | NGC |
| Cpf1 | 5′ (TTTV) |
| SpyMac | 5′-NAA-3′ |

[0596] In some embodiments, the PAM is NGC. In some embodiments, the NGC PAM is recognized by a Cas9 variant. In some embodiments, the NGC PAM Cas9 variant includes one or more amino acid substitutions selected from D1135M, S1136Q, G1218K, E1219F, A1322R, D1332A, R1335E, and T1337R (collectively termed “MQKFRAER”) of spCas9 (SEQ ID No: 197), or a corresponding mutation in another Cas9. In some embodiments, the Cas9 variant contains one or more amino acid substitutions selected from D1135V, G1218R, R1335Q, and T1337R (collectively termed VRQR) of spCas9 (SEQ ID No: 197), or a corresponding mutation in another Cas9. In some embodiments, the Cas9 variant contains one or more amino acid substitutions selected from D1135V, G1218R, R1335E, and T1337R (collectively termed VRER) of spCas9 (SEQ ID No: 197), or a corresponding mutation in another Cas9. In some embodiments, the Cas9 variant contains one or more amino acid substitutions selected from E782K, N968K, and R1015H (collectively termed KHH) of saCas9 (SEQ ID NO: 218). In some embodiments, the Cas9 variant includes one or more amino acid substitutions selected from D1135M, S1136Q, G1218K, E1219S, R1335E, and T1337R (collectively termed “MQKSER”) of spCas9 (SEQ ID No: 197), or a corresponding mutation in another Cas9. In some embodiments, the Cas9 variant includes one or more amino acid substitutions selected from D1135M, S1136Q, G1218K, E1219S, R1335E, and T1337R (collectively termed “MQKSER”) of spCas9 (SEQ ID No: 197), or a corresponding mutation in another Cas9.

[0597] In some embodiments, the PAM is NGT. In some embodiments, the NGT PAM is recognized by a Cas9 variant. In some embodiments, the Cas9 variant is generated through targeted mutations at one or more residues 1335, 1337, 1135, 1136, 1218, and/or 1219 of spCas9 (SEQ ID No: 197), or a corresponding mutation in another Cas9. In some embodiments, the NGT PAM Cas9 variant is created through targeted mutations at one or more residues 1219, 1335, 1337, 1218 of spCas9 (SEQ ID No: 197), or a corresponding mutation in another Cas9. In some embodiments, the NGT PAM Cas9 variant is created through targeted mutations at one or more residues 1135, 1136, 1218, 1219, and 1335 of spCas9 (SEQ ID No: 197, or a corresponding mutation in another Cas9. In some embodiments, the NGT PAM Cas9 variant is selected from the set of targeted mutations provided in Tables 8A and 8B below.

TABLE 8A
NGT PAM Variant Mutations at residues 1219,
1335, 1337, 1218 of spCas9 (SEQ ID No: 197),
or a corresponding mutation in another Cas9

| Variant | E1219V | R1335Q | T1337 | G1218 |
|---|---|---|---|---|
| 1 | F | V | T | |
| 2 | F | V | R | |
| 3 | F | V | Q | |
| 4 | F | V | L | |
| 5 | F | V | T | R |
| 6 | F | V | R | R |
| 7 | F | V | Q | R |
| 8 | F | V | L | R |
| 9 | L | L | T | |
| 10 | L | L | R | |
| 11 | L | L | Q | |
| 12 | L | L | L | |
| 13 | F | I | T | |
| 14 | F | I | R | |
| 15 | F | I | Q | |
| 16 | F | I | L | |
| 17 | F | G | C | |
| 18 | H | L | N | |
| 19 | F | G | C | A |
| 20 | H | L | N | V |
| 21 | L | A | W | |
| 22 | L | A | F | |
| 23 | L | A | Y | |
| 24 | I | A | W | |
| 25 | I | A | F | |
| 26 | I | A | Y | |

TABLE 8B
NGT PAM Variant Mutations at residues 1135, 1136,
1218, 1219, and 1335 of spCas9 (SEQ ID No: 197),
or a corresponding mutation in another Cas9

| Variant | D1135L | S1136R | G1218S | E1219V | R1335Q |
|---|---|---|---|---|---|
| 27 | G | | | | |
| 28 | V | | | | |
| 29 | I | | | | |
| 30 | | A | | | |
| 31 | | W | | | |
| 32 | | H | | | |
| 33 | | K | | | |
| 34 | | | K | | |
| 35 | | | R | | |
| 36 | | | Q | | |
| 37 | | | T | | |
| 38 | | | N | | |
| 39 | | | | I | |
| 40 | | | | A | |
| 41 | | | | N | |
| 42 | | | | Q | |
| 43 | | | | G | |
| 44 | | | | L | |
| 45 | | | | S | |
| 46 | | | | T | |
| 47 | | | | | L |
| 48 | | | | | I |
| 49 | | | | | V |
| 50 | | | | | N |
| 51 | | | | | S |
| 52 | | | | | T |
| 53 | | | | | F |
| 54 | | | | | Y |
| 55 | N1286Q | I1331F | | | |

[0598] In some embodiments, the NGT PAM Cas9 variant is selected from variant 5, 7, 28, 31, or 36 in Table 8A and Table 8B. In some embodiments, the variants have improved NGT PAM recognition.

[0599] In some embodiments, the NGT PAM Cas9 variants have mutations at residues 1219, 1335, 1337, and/or 1218. In some embodiments, the NGT PAM Cas9 variant is selected with mutations for improved recognition from the variants provided in Table 9 below.

TABLE 9
NGT PAM Variant Mutations at residues 1219, 1335,
1337, and 1218 of spCas9 (SEQ ID No: 197), or
a corresponding mutation in another Cas9

| Variant | E1219V | R1335Q | T1337 | G1218 |
|---|---|---|---|---|
| 1 | F | V | T | |
| 2 | F | V | R | |
| 3 | F | V | Q | |
| 4 | F | V | L | |
| 5 | F | V | T | R |
| 6 | F | V | R | R |
| 7 | F | V | Q | R |
| 8 | F | V | L | R |

[0600] In some embodiments, the NGT PAM Cas9 variant is selected from the variants provided in Table 10 below.

TABLE 10
NGT PAM variants, where the amino acid residue locations are referenced to
of spCas9 (SEQ ID No: 197), or a corresponding mutation in another Cas9

| | NGTN | | | | | | | |
|---|---|---|---|---|---|---|---|---|
| | variant | D1135 | S1136 | G1218 | E1219 | A1322R | R1335 | T1337 |
| Variant 1 | LRKIQK | L | R | K | I | — | Q | K |
| Variant 2 | LRSVQK | L | R | S | V | — | Q | K |
| Variant 3 | LRSVQL | L | R | S | V | — | Q | L |
| Variant 4 | LRKIRQK | L | R | K | I | R | Q | K |
| Variant 5 | LRSVRQK | L | R | S | V | R | Q | K |
| Variant 6 | LRSVRQL | L | R | S | V | R | Q | L |

[0601] In some embodiments the NGTN Cas9 variant is variant 1. In some embodiments, the NGTN Cas9 variant is variant 2. In some embodiments, the NGTN Cas9 variant is variant 3. In some embodiments, the NGTN Cas9 variant is variant 4. In some embodiments, the NGTN variant is variant 5. In some embodiments, the NGTN Cas9 variant is variant 6.

[0602] In some embodiments, the Cas9 domain is a Cas9 domain from Streptococcus pyogenes (SpCas9). In some embodiments, the SpCas9 domain is a nuclease active SpCas9, a nuclease inactive SpCas9 (SpCas9d), or a SpCas9 nickase (SpCas9n). In some embodiments, the SpCas9 comprises a D9X mutation, or a corresponding mutation in any of the amino acid sequences provided herein, wherein X is any amino acid except for D. In some embodiments, the SpCas9 comprises a D9A mutation, or a corresponding mutation in any of the amino acid sequences provided herein. In some embodiments, the SpCas9 domain, the SpCas9d domain, or the SpCas9n domain can bind to a nucleic acid sequence having a non-canonical PAM. In some embodiments, the SpCas9 domain, the SpCas9d domain, or the SpCas9n domain can bind to a nucleic acid sequence having an NGG, a NGA, or a NGCG PAM sequence.

[0603] In some embodiments, the SpCas9 domain comprises one or more of a D1135X, a R1335X, and a T1337X mutation, or a corresponding mutation in any of the amino acid sequences provided herein, wherein X is any amino acid. In some embodiments, the SpCas9 domain comprises one or more of a D1135E, R1335Q, and T1337R mutation, or a corresponding mutation in any of the amino acid sequences provided herein. In some embodiments, the SpCas9 domain comprises a D1135E, a R1335Q, and a T1337R mutation, or corresponding mutations in any of the amino acid sequences provided herein. In some embodiments, the SpCas9 domain comprises one or more of a D1135X, a R1335X, and a T1337X mutation, or a corresponding mutation in any of the amino acid sequences provided herein, wherein X is any amino acid. In some embodiments, the SpCas9 domain comprises one or more of a D1135V, a R1335Q, and a T1337R mutation, or a corresponding mutation in any of the amino acid sequences provided herein. In some embodiments, the SpCas9 domain comprises a D1135V, a R1335Q, and a T1337R mutation, or corresponding mutations in any of the amino acid sequences provided herein. In some embodiments, the SpCas9 domain comprises one or more of a D1135X, a G1218X, a R1335X, and a T1337X mutation, or a corresponding mutation in any of the amino acid sequences provided herein, wherein X is any amino acid. In some embodiments, the SpCas9 domain comprises one or more of a D1135V, a G1218R, a R1335Q, and a T1337R mutation, or a corresponding mutation in any of the amino acid sequences provided herein. In some embodiments, the SpCas9 domain comprises a D1135V, a G1218R, a R1335Q, and a T1337R mutation, or corresponding mutations in any of the amino acid sequences provided herein.

[0604] In some examples, a PAM recognized by a CRISPR protein-derived domain of a base editor disclosed herein can be provided to a cell on a separate oligonucleotide to an insert (e.g., an AAV insert) encoding the base editor. In such embodiments, providing PAM on a separate oligonucleotide can allow cleavage of a target sequence that otherwise would not be able to be cleaved, because no adjacent PAM is present on the same polynucleotide as the target sequence.

[0605] In an embodiment, S. pyogenes Cas9 (SpCas9) can be used as a CRISPR endonuclease for genome engineering. However, others can be used. In some embodiments, a different endonuclease can be used to target certain genomic targets. In some embodiments, synthetic SpCas9-derived variants with non-NGG PAM sequences can be used. Additionally, other Cas9 orthologues from various species have been identified and these “non-SpCas9s” can bind a variety of PAM sequences that can also be useful for the present disclosure. For example, the relatively large size of SpCas9 (approximately 4 kb coding sequence) can lead to plasmids carrying the SpCas9 cDNA that cannot be efficiently expressed in a cell. Conversely, the coding sequence for Staphylococcus aureus Cas9 (SaCas9) is approximately 1 kilobase shorter than SpCas9, possibly allowing it to be efficiently expressed in a cell. Similar to SpCas9, the SaCas9 endonuclease is capable of modifying target genes in mammalian cells in vitro and in mice in vivo. In some embodiments, a Cas protein can target a different PAM sequence. In some embodiments, a target gene can be adjacent to a Cas9 PAM, 5′-NGG, for example. In other embodiments, other Cas9 orthologs can have different PAM requirements. For example, other PAMs such as those of S. thermophilus (5′-NNAGAA for CRISPRI and 5′-NGGNG for CRISPR3) and Neisseria meningitidis (5′-NNNNGATT) can also be found adjacent to a target gene.

[0606] In some embodiments, for a S. pyogenes system, a target gene sequence can precede (i.e., be 5′ to) a 5′-NGG PAM, and a 20-nt guide RNA sequence can base pair with an opposite strand to mediate a Cas9 cleavage adjacent to a PAM. In some embodiments, an adjacent cut can be or can be about 3 base pairs upstream of a PAM. In some embodiments, an adjacent cut can be or can be about 10 base pairs upstream of a PAM. In some embodiments, an adjacent cut can be or can be about 0-20 base pairs upstream of a PAM. For example, an adjacent cut can be next to, 1, 2, 3, 4, 5, 6, 7, 8, 9, 10, 11, 12, 13, 14, 15, 16, 17, 18, 19, 20, 21, 22, 23, 24, 25, 26, 27, 28, 29, or 30 base pairs upstream of a PAM. An adjacent cut can also be downstream of a PAM by 1 to 30 base pairs. The sequences of exemplary SpCas9 proteins capable of binding a PAM sequence follow: In some embodiments, engineered SpCas9 variants are capable of recognizing protospacer adjacent motif (PAM) sequences flanked by a 3′ H (non-G PAM) (see Tables 3A-3D). In some embodiments, the SpCas9 variants recognize NRNH PAMs (where R is A or G and H is A, C or T). In some embodiments, the non-G PAM is NRRH, NRTH, or NRCH (see e.g., Miller, S. M., et al. Continuous evolution of SpCas9 variants compatible with non-G PAMs, Nat. Biotechnol. (2020), the contents of which is incorporated herein by reference in its entirety).

[0607] In some embodiments, the Cas9 domain is a recombinant Cas9 domain. In some embodiments, the recombinant Cas9 domain is a SpyMacCas9 domain. In some embodiments, the SpyMacCas9 domain is a nuclease active SpyMacCas9, a nuclease inactive SpyMacCas9 (SpyMacCas9d), or a SpyMacCas9 nickase (SpyMacCas9n). In some embodiments, the SaCas9 domain, the SaCas9d domain, or the SaCas9n domain can bind to a nucleic acid sequence having a non-canonical PAM. In some embodiments, the SpyMacCas9 domain, the SpCas9d domain, or the SpCas9n domain can bind to a nucleic acid sequence having a NAA PAM sequence.

[0608] The sequence of an exemplary Cas9 A homolog of Spy Cas9 in Streptococcus macacae with native 5′-NAAN-3′ PAM specificity is known in the art and described, for example, by Chatterjee, et al., “A Cas9 with PAM recognition for adenine dinucleotides”, Nature Communications, vol. 11, article no. 2474 (2020), and is in the Sequence Listing as SEQ ID NO: 237.

[0609] In some embodiments, a variant Cas9 protein harbors, H840A, P475A, W476A, N477A, D1125A, W1126A, and D1218A mutations relative to a reference Cas9 sequence (e.g., spCas9 (SEQ ID No: 197)), or to a corresponding mutation in another Cas9, such that the polypeptide has a reduced ability to cleave a target DNA or RNA. Such a Cas9 protein has a reduced ability to cleave a target DNA (e.g., a single stranded target DNA) but retains the ability to bind a target DNA (e.g., a single stranded target DNA). As another non-limiting example, in some embodiments, the variant Cas9 protein harbors D10A, H840A, P475A, W476A, N477A, D1125A, W1126A, and D1218A mutations relative to a reference Cas9 sequence (e.g., spCas9 (SEQ ID No: 197)), or to a corresponding mutation in another Cas9, such that the polypeptide has a reduced ability to cleave a target DNA. Such a Cas9 protein has a reduced ability to cleave a target DNA (e.g., a single stranded target DNA) but retains the ability to bind a target DNA (e.g., a single stranded target DNA). In some embodiments, when a variant Cas9 protein harbors W476A and W1126A mutations or when the variant Cas9 protein harbors P475A, W476A, N477A, D1125A, W1126A, and D1218A mutations relative to a reference Cas9 sequence (e.g., spCas9 (SEQ ID No: 197)), or to a corresponding mutation in another Cas9, the variant Cas9 protein does not bind efficiently to a PAM sequence. Thus, in some such cases, when such a variant Cas9 protein is used in a method of binding, the method does not require a PAM sequence. In other words, in some embodiments, when such a variant Cas9 protein is used in a method of binding, the method can include a guide RNA, but the method can be performed in the absence of a PAM sequence (and the specificity of binding is therefore provided by the targeting segment of the guide RNA). Other residues can be mutated to achieve the above effects (i.e., inactivate one or the other nuclease portions). As non-limiting examples, residues D10, G12, G17, E762, H840, N854, N863, H982, H983, A984, D986, and/or A987 can be altered (i.e., substituted) relative to a reference Cas9 sequence (e.g., spCas9 (SEQ ID No: 197)), or to a corresponding mutation in another Cas9. Also, mutations other than alanine substitutions are suitable.

[0610] In some embodiments, a CRISPR protein-derived domain of a base editor comprises all or a portion (e.g., a functional portion) of a Cas9 protein with a canonical PAM sequence (NGG). In other embodiments, a Cas9-derived domain of a base editor can employ a non-canonical PAM sequence. Such sequences have been described in the art and would be apparent to the skilled artisan. For example, Cas9 domains that bind non-canonical PAM sequences have been described in Kleinstiver, B. P., et al., “Engineered CRISPR-Cas9 nucleases with altered PAM specificities” Nature 523, 481-485 (2015); and Kleinstiver, B. P., et al., “Broadening the targeting range of Staphylococcus aureus CRISPR-Cas9 by modifying PAM recognition” Nature Biotechnology 33, 1293-1298 (2015); R. T. Walton et al. “Unconstrained genome targeting with near-PAMless engineered CRISPR-Cas9 variants” Science 10.1126/science.aba8853 (2020); Hu et al. “Evolved Cas9 variants with broad PAM compatibility and high DNA specificity,” Nature, 2018 Apr. 5, 556(7699), 57-63; Miller et al., “Continuous evolution of SpCas9 variants compatible with non-G PAMs” Nat. Biotechnol., 2020 April; 38(4):471-481; the entire contents of each are hereby incorporated by reference.

Fusion Proteins or Complexes Comprising a NapDNAbp and a Cytidine Deaminase and/or Adenosine Deaminase

[0611] Some aspects of the disclosure provide fusion proteins or complexes comprising a Cas9 domain or other nucleic acid programmable DNA binding protein (e.g., Cas12) and one or more cytidine deaminase or adenosine deaminase domains. It should be appreciated that the Cas9 domain may be any of the Cas9 domains or Cas9 proteins (e.g., dCas9 or nCas9) provided herein. In some embodiments, any of the Cas9 domains or Cas9 proteins (e.g., dCas9 or nCas9) provided herein may be fused with any of the cytidine deaminases and/or adenosine deaminases provided herein. The domains of the base editors disclosed herein can be arranged in any order.

[0612] In some embodiments, the fusion protein comprises the following domains A-C, A-D, or A-E:
[0613] NH₂-[A-B-C]-COOH;
[0614] NH₂-[A-B-C-D]-COOH; or
[0615] NH₂-[A-B-C-D-E]-COOH;
   wherein A and C or A, C, and E, each comprises one or more of the following:
[0616] an adenosine deaminase domain or an active fragment thereof,
[0617] a cytidine deaminase domain or an active fragment thereof, and
[0618] wherein B or B and D, each comprises one or more domains having nucleic acid sequence specific binding activity.

[0619] In some embodiments, the fusion protein comprises the following structure:
[0620] NH₂-[Aₙ-Bₒ-Cₙ]-COOH;
[0621] NH₂-[Aₙ-Bₒ-Cₙ-Dₒ]-COOH; or
[0622] NH₂-[Aₙ-Bₒ-Cₚ-Dₒ-E_{q}]-COOH;
   wherein A and C or A, C, and E, each comprises one or more of the following:
[0623] an adenosine deaminase domain or an active fragment thereof,
[0624] a cytidine deaminase domain or an active fragment thereof, and
   wherein n is an integer: 1, 2, 3, 4, or 5, wherein p is an integer: 0, 1, 2, 3, 4, or 5; wherein q is an integer 0, 1, 2, 3, 4, or 5; and wherein B or B and D each comprises a domain having nucleic acid sequence specific binding activity; and wherein o is an integer: 1, 2, 3, 4, or 5.

[0625] For example, and without limitation, in some embodiments, the fusion protein comprises the structure:
[0626] NH₂-[adenosine deaminase]-[Cas9 domain]-COOH;
[0627] NH₂-[Cas9 domain]-[adenosine deaminase]-COOH;
[0628] NH₂-[cytidine deaminase]-[Cas9 domain]-COOH;
[0629] NH₂-[Cas9 domain]-[cytidine deaminase]-COOH;
[0630] NH₂-[cytidine deaminase]-[Cas9 domain]-[adenosine deaminase]-COOH;
[0631] NH₂-[adenosine deaminase]-[Cas9 domain]-[cytidine deaminase]-COOH;
[0632] NH₂-[adenosine deaminase]-[cytidine deaminase]-[Cas9 domain]-COOH;
[0633] NH₂-[cytidine deaminase]-[adenosine deaminase]-[Cas9 domain]-COOH;
[0634] NH₂-[Cas9 domain]-[adenosine deaminase]-[cytidine deaminase]-COOH; or
[0635] NH₂-[Cas9 domain]-[cytidine deaminase]-[adenosine deaminase]-COOH.

[0636] In some embodiments, any of the Cas12 domains or Cas12 proteins provided herein may be fused with any of the cytidine or adenosine deaminases provided herein. For example, and without limitation, in some embodiments, the fusion protein comprises the structure:
[0637] NH₂-[adenosine deaminase]-[Cas12 domain]-COOH;
[0638] NH₂-[Cas12 domain]-[adenosine deaminase]-COOH;
[0639] NH₂-[cytidine deaminase]-[Cas12 domain]-COOH;
[0640] NH₂-[Cas12 domain]-[cytidine deaminase]-COOH;
[0641] NH₂-[cytidine deaminase]-[Cas12 domain]-[adenosine deaminase]-COOH;
[0642] NH₂-[adenosine deaminase]-[Cas12 domain]-[cytidine deaminase]-COOH;
[0643] NH₂-[adenosine deaminase]-[cytidine deaminase]-[Cas12 domain]-COOH;
[0644] NH₂-[cytidine deaminase]-[adenosine deaminase]-[Cas12 domain]-COOH;
[0645] NH₂-[Cas12 domain]-[adenosine deaminase]-[cytidine deaminase]-COOH; or
[0646] NH₂-[Cas12 domain]-[cytidine deaminase]-[adenosine deaminase]-COOH.

[0647] In some embodiments, the adenosine deaminase is a TadA*8. Exemplary fusion protein structures include the following:
[0648] NH₂-[TadA*8]-[Cas9 domain]-COOH;
[0649] NH₂-[Cas9 domain]-[TadA*8]-COOH;
[0650] NH₂-[TadA*8]-[Cas12 domain]-COOH; or
[0651] NH₂-[Cas12 domain]-[TadA*8]-COOH.

[0652] In some embodiments, the adenosine deaminase of the fusion protein or complex comprises a TadA*8 and a cytidine deaminase and/or an adenosine deaminase. In some embodiments, the TadA*8 is TadA*8.1, TadA*8.2, TadA*8.3, TadA*8.4, TadA*8.5, TadA*8.6, TadA*8.7, TadA*8.8, TadA*8.9, TadA*8.10, TadA*8.11, TadA*8.12, TadA*8.13, TadA*8.14, TadA*8.15, TadA*8.16, TadA*8.17, TadA*8.18, TadA*8.19, TadA*8.20, TadA*8.21, TadA*8.22, TadA*8.23, or TadA*8.24.

[0653] Exemplary fusion protein structures include the following:
[0654] NH₂-[TadA*8]-[Cas9/Cas12]-[adenosine deaminase]-COOH;
[0655] NH₂-[adenosine deaminase]-[Cas9/Cas12]-[TadA*8]-COOH;
[0656] NH₂-[TadA*8]-[Cas9/Cas12]-[cytidine deaminase]-COOH; or
[0657] NH₂-[cytidine deaminase]-[Cas9/Cas12]-[TadA*8]-COOH.

[0658] In some embodiments, the adenosine deaminase of the fusion protein comprises a TadA*9 and a cytidine deaminase and/or an adenosine deaminase. Exemplary fusion protein structures include the following:
[0659] NH₂-[TadA*9]-[Cas9/Cas12]-[adenosine deaminase]-COOH;
[0660] NH₂-[adenosine deaminase]-[Cas9/Cas12]-[TadA*9]-COOH;
[0661] NH₂-[TadA*9]-[Cas9/Cas12]-[cytidine deaminase]-COOH; or
[0662] NH₂-[cytidine deaminase]-[Cas9/Cas12]-[TadA*9]-COOH.

[0663] In some embodiments, the fusion protein comprises a deaminase flanked by an N-terminal fragment and a C-terminal fragment of a Cas9 or Cas12 polypeptide. In some embodiments, the fusion protein comprises a cytidine deaminase flanked by an N-terminal fragment and a C-terminal fragment of a Cas9 or Cas12 polypeptide. In some embodiments, the fusion protein comprises an adenosine deaminase flanked by an N-terminal fragment and a C-terminal fragment of a Cas9 or Cas 12 polypeptide.

[0664] In some embodiments, the fusion proteins or complexes comprising a cytidine deaminase or adenosine deaminase and a napDNAbp (e.g., Cas9 or Cas12 domain) do not include a linker sequence. In some embodiments, a linker is present between the cytidine or adenosine deaminase and the napDNAbp. In some embodiments, the “−” used in the general architecture above indicates the optional presence of a linker. In some embodiments, cytidine or adenosine deaminase and the napDNAbp are fused via any of the linkers provided herein. For example, in some embodiments the cytidine or adenosine deaminase and the napDNAbp are fused via any of the linkers provided herein.

[0665] It should be appreciated that the fusion proteins or complexes of the present disclosure may comprise one or more additional features. For example, in some embodiments, the fusion protein or complex may comprise inhibitors, cytoplasmic localization sequences, export sequences, such as nuclear export sequences, or other localization sequences, as well as sequence tags that are useful for solubilization, purification, or detection of the fusion proteins or complexes. Suitable protein tags provided herein include, but are not limited to, biotin carboxylase carrier protein (BCCP) tags, myc-tags, calmodulin-tags, FLAG-tags, hemagglutinin (HA)-tags, polyhistidine tags, also referred to as histidine tags or His-tags, maltose binding protein (MBP)-tags, nus-tags, glutathione-S-transferase (GST)-tags, green fluorescent protein (GFP)-tags, thioredoxin-tags, S-tags, Softags (e.g., Softag 1, Softag 3), strep-tags, biotin ligase tags, FlAsH tags, V5 tags, and SBP-tags. Additional suitable sequences will be apparent to those of skill in the art. In some embodiments, the fusion protein or complex comprises one or more His tags.

[0666] Exemplary, yet nonlimiting, fusion proteins are described in International PCT Application Nos. PCT/US2017/045381, PCT/US2019/044935, and PCT/US2020/016288, each of which is incorporated herein by reference for its entirety.

### Fusion Proteins or Complexes Comprising a Nuclear Localization Sequence (NLS)

[0667] In some embodiments, the fusion proteins or complexes provided herein further comprise one or more (e.g., 2, 3, 4, 5) nuclear targeting sequences, for example a nuclear localization sequence (NLS). In one embodiment, a bipartite NLS is used. In some embodiments, a NLS comprises an amino acid sequence that facilitates the importation of a protein, that comprises an NLS, into the cell nucleus (e.g., by nuclear transport). In some embodiments, the NLS is fused to the N-terminus or the C-terminus of the fusion protein. In some embodiments, the NLS is fused to the C-terminus or N-terminus of an nCas9 domain or a dCas9 domain. In some embodiments, the NLS is fused to the N-terminus or C-terminus of the Cas12 domain. In some embodiments, the NLS is fused to the N-terminus or C-terminus of the cytidine or adenosine deaminase. In some embodiments, the NLS is fused to the fusion protein via one or more linkers. In some embodiments, the NLS is fused to the fusion protein without a linker. In some embodiments, the NLS comprises an amino acid sequence of any one of the NLS sequences provided or referenced herein. Additional nuclear localization sequences are known in the art and would be apparent to the skilled artisan. For example, NLS sequences are described in Plank et al., PCT/EP2000/011690, the contents of which are incorporated herein by reference for their disclosure of exemplary nuclear localization sequences. In some embodiments, an NLS comprises the amino acid sequence PKKKRKVEGADKRTADGSEFESPKKKRKV (SEQ ID NO: 328), KRTADGSEFESPKKKRKV (SEQ ID NO: 190), KRPAATKKAGQAKKKK (SEQ ID NO: 191), KKTELQTTNAENKTKKL (SEQ ID NO: 192), KRGINDRNFWRGENGRKTR (SEQ ID NO: 193), RKSGKIAAIVVKRPRKPKKKRKV (SEQ ID NO: 329), or MDSLLMNRRKFLYQFKNVRWAKGRRETYLC (SEQ ID NO: 196).

[0668] In some embodiments, the fusion proteins or complexes comprising a cytidine or adenosine deaminase, a Cas9 domain, and an NLS do not comprise a linker sequence. In some embodiments, linker sequences between one or more of the domains or proteins (e.g., cytidine or adenosine deaminase, Cas9 domain or NLS) are present. In some embodiments, a linker is present between the cytidine deaminase and adenosine deaminase domains and the napDNAbp. In some embodiments, the “−” used in the general architecture below indicates the optional presence of a linker. In some embodiments, the cytidine deaminase and adenosine deaminase and the napDNAbp are fused via any of the linkers provided herein. For example, in some embodiments the cytidine deaminase and adenosine deaminase and the napDNAbp are fused via any of the linkers provided herein.

[0669] In some embodiments, the general architecture of exemplary napDNAbp (e.g., Cas9 or Cas12) fusion proteins with a cytidine or adenosine deaminase and a napDNAbp (e.g., Cas9 or Cas12) domain comprises any one of the following structures, where NLS is a nuclear localization sequence (e.g., any NLS provided herein), NH₂ is the N-terminus of the fusion protein, and COOH is the C-terminus of the fusion protein:
[0670] NH₂-NLS-[cytidine deaminase]-[napDNAbp domain]-COOH;
[0671] NH₂-NLS [napDNAbp domain]-[cytidine deaminase]-COOH;
[0672] NH₂-[cytidine deaminase]-[napDNAbp domain]-NLS—COOH;
[0673] NH₂-[napDNAbp domain]-[cytidine deaminase]-NLS—COOH;
[0674] NH₂-NLS-[adenosine deaminase]-[napDNAbp domain]-COOH;
[0675] NH₂-NLS [napDNAbp domain]-[adenosine deaminase]-COOH;
[0676] NH₂-[adenosine deaminase]-[napDNAbp domain]-NLS—COOH;
[0677] NH₂-[napDNAbp domain]-[adenosine deaminase]-NLS—COOH;
[0678] NH₂-NLS-[cytidine deaminase]-[napDNAbp domain]-[adenosine deaminase]-COOH;
[0679] NH₂-NLS-[adenosine deaminase]-[napDNAbp domain]-[cytidine deaminase]-COOH;
[0680] NH₂-NLS-[adenosine deaminase] [cytidine deaminase]-[napDNAbp domain]-COOH;
[0681] NH₂-NLS-[cytidine deaminase]-[adenosine deaminase]-[napDNAbp domain]-COOH;
[0682] NH₂-NLS-[napDNAbp domain]-[adenosine deaminase]-[cytidine deaminase]-COOH;
[0683] NH₂-NLS-[napDNAbp domain]-[cytidine deaminase]-[adenosine deaminase]-COOH;
[0684] NH₂-[cytidine deaminase]-[napDNAbp domain]-[adenosine deaminase]-NLS—COOH;
[0685] NH₂-[adenosine deaminase]-[napDNAbp domain]-[cytidine deaminase]-NLS—COOH;
[0686] NH₂-[adenosine deaminase] [cytidine deaminase]-[napDNAbp domain]-NLS—COOH;
[0687] NH₂-[cytidine deaminase]-[adenosine deaminase]-[napDNAbp domain]-NLS—COOH;
[0688] NH₂-[napDNAbp domain]-[adenosine deaminase]-[cytidine deaminase]-NLS—COOH; or
[0689] NH₂-[napDNAbp domain]-[cytidine deaminase]-[adenosine deaminase]-NLS—COOH. In some embodiments, the NLS is present in a linker or the NLS is flanked by linkers, for example described herein. A bipartite NLS comprises two basic amino acid clusters, which are separated by a relatively short spacer sequence (hence bipartite—2 parts, while monopartite NLSs are not). The NLS of nucleoplasmin, KR [PAATKKAGQA] KKKK (SEQ ID NO: 191), is the prototype of the ubiquitous bipartite signal: two clusters of basic amino acids, separated by a spacer of about 10 amino acids. The sequence of an exemplary bipartite NLS follows:

(SEQ ID NO: 328)
PKKKRKVEGADKRTADGSEFESPKKKRKV

[0690] A vector that encodes a CRISPR enzyme comprising one or more nuclear localization sequences (NLSs) can be used. For example, there can be or be about 1, 2, 3, 4, 5, 6, 7, 8, 9, 10 NLSs used. A CRISPR enzyme can comprise the NLSs at or near the amino-terminus, about or more than about 1, 2, 3, 4, 5, 6, 7, 8, 9, 10 NLSs at or near the carboxy-terminus, or any combination thereof (e.g., one or more NLS at the amino-terminus and one or more NLS at the carboxy terminus). When more than one NLS is present, each can be selected independently of others, such that a single NLS can be present in more than one copy and/or in combination with one or more other NLSs present in one or more copies.

[0691] CRISPR enzymes used in the methods can comprise about 6 NLSs. An NLS is considered near the N- or C-terminus when the nearest amino acid to the NLS is within about 50 amino acids along a polypeptide chain from the N- or C-terminus, e.g., within 1, 2, 3, 4, 5, 10, 15, 20, 25, 30, 40, or 50 amino acids.

### Additional Domains

[0692] A base editor described herein can include any domain which helps to facilitate the nucleobase editing, modification or altering of a nucleobase of a polynucleotide. In some embodiments, a base editor comprises a polynucleotide programmable nucleotide binding domain (e.g., Cas9), a nucleobase editing domain (e.g., deaminase domain), and one or more additional domains. In some embodiments, the additional domain can facilitate enzymatic or catalytic functions of the base editor, binding functions of the base editor, or be inhibitors of cellular machinery (e.g., enzymes) that could interfere with the desired base editing result. In some embodiments, a base editor comprises a nuclease, a nickase, a recombinase, a deaminase, a methyltransferase, a methylase, an acetylase, an acetyltransferase, a transcriptional activator, or a transcriptional repressor domain.

[0693] In some embodiments, a base editor comprises an uracil glycosylase inhibitor (UGI) domain. In some embodiments, cellular DNA repair response to the presence of U: G heteroduplex DNA can be responsible for a decrease in nucleobase editing efficiency in cells. In such embodiments, uracil DNA glycosylase (UDG) can catalyze removal of U from DNA in cells, which can initiate base excision repair (BER), mostly resulting in reversion of the U:G pair to a C:G pair. In such embodiments, BER can be inhibited in base editors comprising one or more domains that bind the single strand, block the edited base, inhibit UGI, inhibit BER, protect the edited base, and/or promote repairing of the non-edited strand. Thus, this disclosure contemplates a base editor fusion protein or complex comprising a UGI domain and/or a uracil stabilizing protein (USP) domain.

[0694] In some embodiments, a base editor comprises as a domain all or a portion (e.g., a functional portion) of a double-strand break (DSB) binding protein. For example, a DSB binding protein can include a Gam protein of bacteriophage Mu that can bind to the ends of DSBs and can protect them from degradation. See Komor, A. C., et al., “Improved base excision repair inhibition and bacteriophage Mu Gam protein yields C:G-to-T:A base editors with higher efficiency and product purity” Science Advances 3:eaao4774 (2017), the entire content of which is hereby incorporated by reference.

[0695] Additionally, in some embodiments, a Gam protein can be fused to an N terminus of a base editor. In some embodiments, a Gam protein can be fused to a C terminus of a base editor. The Gam protein of bacteriophage Mu can bind to the ends of double strand breaks (DSBs) and protect them from degradation. In some embodiments, using Gam to bind the free ends of DSB can reduce indel formation during the process of base editing. In some embodiments, 174-residue Gam protein is fused to the N terminus of the base editors. See Komor, A. C., et al., “Improved base excision repair inhibition and bacteriophage Mu Gam protein yields C:G-to-T:A base editors with higher efficiency and product purity” Science Advances 3:eaao4774 (2017). In some embodiments, a mutation or mutations can change the length of a base editor domain relative to a wild type domain. For example, a deletion of at least one amino acid in at least one domain can reduce the length of the base editor. In another case, a mutation or mutations do not change the length of a domain relative to a wild type domain. For example, substitutions in any domain does not change the length of the base editor.

[0696] Non-limiting examples of such base editors, where the length of all the domains is the same as the wild type domains, can include:
[0697] NH₂-[nucleobase editing domain]-Linker1-[APOBEC1]-Linker2-[nucleobase editing domain]-COOH;
[0698] NH₂-[nucleobase editing domain]-Linker1-[APOBEC1]-[nucleobase editing domain]-COOH;
[0699] NH₂-[nucleobase editing domain]-[APOBEC1]-Linker2-[nucleobase editing domain]-COOH;
[0700] NH₂-[nucleobase editing domain]-[APOBEC1]-[nucleobase editing domain]-COOH;
[0701] NH₂-[nucleobase editing domain]-Linker1-[APOBEC1]-Linker2-[nucleobase editing domain]-[UGI]-COOH;
[0702] NH₂-[nucleobase editing domain]-Linker1-[APOBEC1]-[nucleobase editing domain]-[UGI]-COOH;
[0703] NH₂-[nucleobase editing domain]-[APOBEC1]-Linker2-[nucleobase editing domain]-[UGI]-COOH;
[0704] NH₂-[nucleobase editing domain]-[APOBEC1]-[nucleobase editing domain]-[UGI]-COOH;
[0705] NH₂-[UGI]-[nucleobase editing domain]-Linker1-[APOBEC1]-Linker2-[nucleobase editing domain]-COOH;
[0706] NH₂-[UGI]-[nucleobase editing domain]-Linker1-[APOBEC1]-[nucleobase editing domain]-COOH;
[0707] NH₂-[UGI]-[nucleobase editing domain]-[APOBEC1]-Linker2-[nucleobase editing domain]-COOH; or
[0708] NH₂-[UGI]-[nucleobase editing domain]-[APOBEC1]-[nucleobase editing domain]-COOH.

### Base Editor System

[0709] Provided herein are systems, compositions, and methods for editing a nucleobase using a base editor system. In some embodiments, the base editor system comprises (1) a base editor (BE) comprising a polynucleotide programmable nucleotide binding domain and a nucleobase editing domain (e.g., a deaminase domain) for editing the nucleobase; and (2) a guide polynucleotide (e.g., guide RNA) in conjunction with the polynucleotide programmable nucleotide binding domain. In some embodiments, the base editor system is a cytidine base editor (CBE) or an adenosine base editor (ABE). In some embodiments, the polynucleotide programmable nucleotide binding domain is a polynucleotide programmable DNA or RNA binding domain. In some embodiments, the nucleobase editing domain is a deaminase domain. In some embodiments, a deaminase domain can be a cytidine deaminase or an cytosine deaminase. In some embodiments, a deaminase domain can be an adenine deaminase or an adenosine deaminase. In some embodiments, the adenosine base editor can deaminate adenine in DNA. In some embodiments, the base editor is capable of deaminating a cytidine in DNA.

[0710] In some embodiments, a base editing system as provided herein provides a new approach to genome editing that uses a fusion protein or complex containing a catalytically defective Streptococcus pyogenes Cas9, a deaminase (e.g., cytidine or adenosine deaminase), and an inhibitor of base excision repair to induce programmable, single nucleotide (C→T or A→G) changes in DNA without generating double-strand DNA breaks, without requiring a donor DNA template, and without inducing an excess of stochastic insertions and deletions.

[0711] Details of nucleobase editing proteins are described in International PCT Application Nos. PCT/US2017/045381 (WO2018/027078) and PCT/US2016/058344 (WO2017/070632), each of which is incorporated herein by reference for its entirety. Also see Komor, A. C., et al., “Programmable editing of a target base in genomic DNA without double-stranded DNA cleavage” Nature 533, 420-424 (2016); Gaudelli, N. M., et al., “Programmable base editing of A•T to G•C in genomic DNA without DNA cleavage” Nature 551, 464-471 (2017); and Komor, A. C., et al., “Improved base excision repair inhibition and bacteriophage Mu Gam protein yields C:G-to-T:A base editors with higher efficiency and product purity” Science Advances 3:eaao4774 (2017), the entire contents of which are hereby incorporated by reference.

[0712] Use of the base editor system provided herein comprises the steps of: (a) contacting a target nucleotide sequence of a polynucleotide (e.g., double- or single stranded DNA or RNA) of a subject with a base editor system comprising a nucleobase editor (e.g., an adenosine base editor or a cytidine base editor) and a guide polynucleic acid (e.g., gRNA), wherein the target nucleotide sequence comprises a targeted nucleobase pair; (b) inducing strand separation of said target region; (c) converting a first nucleobase of said target nucleobase pair in a single strand of the target region to a second nucleobase; and (d) cutting no more than one strand of said target region, where a third nucleobase complementary to the first nucleobase base is replaced by a fourth nucleobase complementary to the second nucleobase. It should be appreciated that in some embodiments, step (b) is omitted. In some embodiments, said targeted nucleobase pair is a plurality of nucleobase pairs in one or more genes. In some embodiments, the base editor system provided herein is capable of multiplex editing of a plurality of nucleobase pairs in one or more genes. In some embodiments, the plurality of nucleobase pairs is located in the same gene. In some embodiments, the plurality of nucleobase pairs is located in one or more genes, wherein at least one gene is located in a different locus.

[0713] In some embodiments, the cut single strand (nicked strand) is hybridized to the guide nucleic acid. In some embodiments, the cut single strand is opposite to the strand comprising the first nucleobase. In some embodiments, the base editor comprises a Cas9 domain. In some embodiments, the first base is adenine, and the second base is not a G, C, A, or T. In some embodiments, the second base is inosine.

[0714] In some embodiments, a single guide polynucleotide may be utilized to target a deaminase to a target nucleic acid sequence. In some embodiments, a single pair of guide polynucleotides may be utilized to target different deaminases to a target nucleic acid sequence.

[0715] The components of a base editor system (e.g., a deaminase domain, a guide RNA, and/or a polynucleotide programmable nucleotide binding domain) may be associated with each other covalently or non-covalently. For example, in some embodiments, the deaminase domain can be targeted to a target nucleotide sequence by a polynucleotide programmable nucleotide binding domain, optionally where the polynucleotide programmable nucleotide binding domain is complexed with a polynucleotide (e.g., a guide RNA). In some embodiments, a polynucleotide programmable nucleotide binding domain can be fused or linked to a deaminase domain. In some embodiments, a polynucleotide programmable nucleotide binding domain can target a deaminase domain to a target nucleotide sequence by non-covalently interacting with or associating with the deaminase domain. For example, in some embodiments, the nucleobase editing component (e.g., the deaminase component) comprises an additional heterologous portion or domain that is capable of interacting with, associating with, or capable of forming a complex with a corresponding heterologous portion, antigen, or domain that is part of a polynucleotide programmable nucleotide binding domain and/or a guide polynucleotide (e.g., a guide RNA) complexed therewith. In some embodiments, the polynucleotide programmable nucleotide binding domain, and/or a guide polynucleotide (e.g., a guide RNA) complexed therewith, comprises an additional heterologous portion or domain that is capable of interacting with, associating with, or capable of forming a complex with a corresponding heterologous portion, antigen, or domain that is part of a nucleobase editing domain (e.g., the deaminase component). In some embodiments, the additional heterologous portion may be capable of binding to, interacting with, associating with, or forming a complex with a polypeptide. In some embodiments, the additional heterologous portion may be capable of binding to, interacting with, associating with, or forming a complex with a polynucleotide. In some embodiments, the additional heterologous portion may be capable of binding to a guide polynucleotide. In some embodiments, the additional heterologous portion may be capable of binding to a polypeptide linker. In some embodiments, the additional heterologous portion is capable of binding to a polynucleotide linker. An additional heterologous portion may be a protein domain. In some embodiments, an additional heterologous portion comprises a polypeptide, such as a 22 amino acid RNA-binding domain of the lambda bacteriophage antiterminator protein N (N22p), a 2G12 IgG homodimer domain, an ABI, an antibody (e.g. an antibody that binds a component of the base editor system or a heterologous portion thereof) or fragment thereof (e.g. heavy chain domain 2 (CH2) of IgM (MHD2) or IgE (EHD2), an immunoglobulin Fc region, a heavy chain domain 3 (CH3) of IgG or IgA, a heavy chain domain 4 (CH4) of IgM or IgE, an Fab, an Fab2, miniantibodies, and/or ZIP antibodies), a barnase-barstar dimer domain, a Bcl-xL domain, a Calcineurin A (CAN) domain, a Cardiac phospholamban transmembrane pentamer domain, a collagen domain, a Com RNA binding protein domain (e.g. SfMu Com coat protein domain, and SfMu Com binding protein domain), a Cyclophilin-Fas fusion protein (CyP-Fas) domain, a Fab domain, an Fc domain, a fibritin foldon domain, an FK506 binding protein (FKBP) domain, an FKBP binding domain (FRB) domain of mTOR, a foldon domain, a fragment X domain, a GAI domain, a GID1 domain, a Glycophorin A transmembrane domain, a GyrB domain, a Halo tag, an HIV Gp41 trimerisation domain, an HPV45 oncoprotein E7 C-terminal dimer domain, a hydrophobic polypeptide, a K Homology (KH) domain, a Ku protein domain (e.g., a Ku heterodimer), a leucine zipper, a LOV domain, a mitochondrial antiviral-signaling protein CARD filament domain, an MS2 coat protein domain (MCP), a non-natural RNA aptamer ligand that binds a corresponding RNA motif/aptamer, a parathyroid hormone dimerization domain, a PP7 coat protein (PCP) domain, a PSD95-Dlgl-zo-1 (PDZ) domain, a PYL domain, a SNAP tag, a SpyCatcher moiety, a SpyTag moiety, a streptavidin domain, a streptavidin-binding protein domain, a streptavidin binding protein (SBP) domain, a telomerase Sm7 protein domain (e.g. Sm7 homoheptamer or a monomeric Sm-like protein), and/or fragments thereof. In embodiments, an additional heterologous portion comprises a polynucleotide (e.g., an RNA motif), such as an MS2 phage operator stem-loop (e.g. an MS2, an MS2 C-5 mutant, or an MS2 F-5 mutant), a non-natural RNA motif, a PP7 operator stem-loop, an SfMu phate Com stem-loop, a steril alpha motif, a telomerase Ku binding motif, a telomerase Sm7 binding motif, and/or fragments thereof. Non-limiting examples of additional heterologous portions include polypeptides with at least about 85% sequence identity to any one or more of SEQ ID NOs: 380, 382, 384, 386-388, or fragments thereof. Non-limiting examples of additional heterologous portions include polynucleotides with at least about 85% sequence identity to any one or more of SEQ ID NOs: 379, 381, 383, 385, or fragments thereof.

[0716] A base editor system may further comprise a guide polynucleotide component. It should be appreciated that components of the base editor system may be associated with each other via covalent bonds, noncovalent interactions, or any combination of associations and interactions thereof. In some embodiments, a deaminase domain can be targeted to a target nucleotide sequence by a guide polynucleotide. For example, in some embodiments, the nucleobase editing component of the base editor system (e.g., the deaminase component) comprises an additional heterologous portion or domain (e.g., polynucleotide binding domain such as an RNA or DNA binding protein) that is capable of interacting with, associating with, or capable of forming a complex with a heterologous portion or segment (e.g., a polynucleotide motif), or antigen of a guide polynucleotide. In some embodiments, the additional heterologous portion or domain (e.g., polynucleotide binding domain such as an RNA or DNA binding protein) can be fused or linked to the deaminase domain. In some embodiments, the additional heterologous portion may be capable of binding to, interacting with, associating with, or forming a complex with a polypeptide. In some embodiments, the additional heterologous portion may be capable of binding to, interacting with, associating with, or forming a complex with a polynucleotide. In some embodiments, the additional heterologous portion may be capable of binding to a guide polynucleotide. In some embodiments, the additional heterologous portion may be capable of binding to a polypeptide linker. In some embodiments, the additional heterologous portion may be capable of binding to a polynucleotide linker. An additional heterologous portion may be a protein domain. In some embodiments, an additional heterologous portion comprises a polypeptide, such as a 22 amino acid RNA-binding domain of the lambda bacteriophage antiterminator protein N (N22p), a 2G12 IgG homodimer domain, an ABI, an antibody (e.g. an antibody that binds a component of the base editor system or a heterologous portion thereof) or fragment thereof (e.g. heavy chain domain 2 (CH2) of IgM (MHD2) or IgE (EHD2), an immunoglobulin Fc region, a heavy chain domain 3 (CH3) of IgG or IgA, a heavy chain domain 4 (CH4) of IgM or IgE, an Fab, an Fab2, miniantibodies, and/or ZIP antibodies), a barnase-barstar dimer domain, a Bcl-xL domain, a Calcineurin A (CAN) domain, a Cardiac phospholamban transmembrane pentamer domain, a collagen domain, a Com RNA binding protein domain (e.g. SfMu Com coat protein domain, and SfMu Com binding protein domain), a Cyclophilin-Fas fusion protein (CyP-Fas) domain, a Fab domain, an Fc domain, a fibritin foldon domain, an FK506 binding protein (FKBP) domain, an FKBP binding domain (FRB) domain of mTOR, a foldon domain, a fragment X domain, a GAI domain, a GID1 domain, a Glycophorin A transmembrane domain, a GyrB domain, a Halo tag, an HIV Gp41 trimerisation domain, an HPV45 oncoprotein E7 C-terminal dimer domain, a hydrophobic polypeptide, a K Homology (KH) domain, a Ku protein domain (e.g., a Ku heterodimer), a leucine zipper, a LOV domain, a mitochondrial antiviral-signaling protein CARD filament domain, an MS2 coat protein domain (MCP), a non-natural RNA aptamer ligand that binds a corresponding RNA motif/aptamer, a parathyroid hormone dimerization domain, a PP7 coat protein (PCP) domain, a PSD95-Dlgl-zo-1 (PDZ) domain, a PYL domain, a SNAP tag, a SpyCatcher moiety, a SpyTag moiety, a streptavidin domain, a streptavidin-binding protein domain, a streptavidin binding protein (SBP) domain, a telomerase Sm7 protein domain (e.g. Sm7 homoheptamer or a monomeric Sm-like protein), and/or fragments thereof. In embodiments, an additional heterologous portion comprises a polynucleotide (e.g., an RNA motif), such as an MS2 phage operator stem-loop (e.g. an MS2, an MS2 C-5 mutant, or an MS2 F-5 mutant), a non-natural RNA motif, a PP7 operator stem-loop, an SfMu phate Com stem-loop, a steril alpha motif, a telomerase Ku binding motif, a telomerase Sm7 binding motif, and/or fragments thereof. Non-limiting examples of additional heterologous portions include polypeptides with at least about 85% sequence identity to any one or more of SEQ ID NOs: 380, 382, 384, 386-388, or fragments thereof. Non-limiting examples of additional heterologous portions include polynucleotides with at least about 85% sequence identity to any one or more of SEQ ID NOs: 379, 381, 383, 385, or fragments thereof.

[0717] In some embodiments, a base editor system can further comprise an inhibitor of base excision repair (BER) component. It should be appreciated that components of the base editor system may be associated with each other via covalent bonds, noncovalent interactions, or any combination of associations and interactions thereof. The inhibitor of BER component may comprise a base excision repair inhibitor. In some embodiments, the inhibitor of base excision repair can be a uracil DNA glycosylase inhibitor (UGI). In some embodiments, the agent inhibiting the uracil-excision repair system is a uracil stabilizing protein (USP). In some embodiments, the inhibitor of base excision repair can be an inosine base excision repair inhibitor. In some embodiments, the inhibitor of base excision repair can be targeted to the target nucleotide sequence by the polynucleotide programmable nucleotide binding domain, optionally where the polynucleotide programmable nucleotide binding domain is complexed with a polynucleotide (e.g., a guide RNA). In some embodiments, a polynucleotide programmable nucleotide binding domain can be fused or linked to an inhibitor of base excision repair. In some embodiments, a polynucleotide programmable nucleotide binding domain can be fused or linked to a deaminase domain and an inhibitor of base excision repair. In some embodiments, a polynucleotide programmable nucleotide binding domain can target an inhibitor of base excision repair to a target nucleotide sequence by non-covalently interacting with or associating with the inhibitor of base excision repair. For example, in some embodiments, the inhibitor of base excision repair component comprises an additional heterologous portion or domain that is capable of interacting with, associating with, or capable of forming a complex with a corresponding additional heterologous portion, antigen, or domain that is part of a polynucleotide programmable nucleotide binding domain. In some embodiments, the polynucleotide programming nucleotide binding domain component, and/or a guide polynucleotide (e.g., a guide RNA) complexed therewith, comprises an additional heterologous portion or domain that is capable of interacting with, associating with, or capable of forming a corresponding heterologous portion, antigen, or domain that is part of an inhibitor of base excision repair component. In some embodiments, the inhibitor of base excision repair can be targeted to the target nucleotide sequence by the guide polynucleotide. For example, in some embodiments, the inhibitor of base excision repair comprises an additional heterologous portion or domain (e.g., polynucleotide binding domain such as an RNA or DNA binding protein) that is capable of interacting with, associating with, or capable of forming a complex with a portion or segment (e.g., a polynucleotide motif) of a guide polynucleotide. In some embodiments, the additional heterologous portion or domain of the guide polynucleotide (e.g., polynucleotide binding domain such as an RNA or DNA binding protein) can be fused or linked to the inhibitor of base excision repair. In some embodiments, the additional heterologous portion may be capable of binding to, interacting with, associating with, or forming a complex with a polynucleotide. In some embodiments, the additional heterologous portion may be capable of binding to a guide polynucleotide. In some embodiments, the additional heterologous portion may be capable of binding to a polypeptide linker. In some embodiments, the additional heterologous portion may be capable of binding to a polynucleotide linker. An additional heterologous portion may be a protein domain. In some embodiments, an additional heterologous portion comprises a polypeptide, such as a 22 amino acid RNA-binding domain of the lambda bacteriophage antiterminator protein N (N22p), a 2G12 IgG homodimer domain, an ABI, an antibody (e.g. an antibody that binds a component of the base editor system or a heterologous portion thereof) or fragment thereof (e.g. heavy chain domain 2 (CH2) of IgM (MH1D2) or IgE (EHD2), an immunoglobulin Fc region, a heavy chain domain 3 (CH3) of IgG or IgA, a heavy chain domain 4 (CH4) of IgM or IgE, an Fab, an Fab2, miniantibodies, and/or ZIP antibodies), a barnase-barstar dimer domain, a Bcl-xL domain, a Calcineurin A (CAN) domain, a Cardiac phospholamban transmembrane pentamer domain, a collagen domain, a Com RNA binding protein domain (e.g. SfMu Com coat protein domain, and SfMu Com binding protein domain), a Cyclophilin-Fas fusion protein (CyP-Fas) domain, a Fab domain, an Fc domain, a fibritin foldon domain, an FK506 binding protein (FKBP) domain, an FKBP binding domain (FRB) domain of mTOR, a foldon domain, a fragment X domain, a GAI domain, a GID1 domain, a Glycophorin A transmembrane domain, a GyrB domain, a Halo tag, an HIV Gp41 trimerisation domain, an HPV45 oncoprotein E7 C-terminal dimer domain, a hydrophobic polypeptide, a K Homology (KH) domain, a Ku protein domain (e.g., a Ku heterodimer), a leucine zipper, a LOV domain, a mitochondrial antiviral-signaling protein CARD filament domain, an MS2 coat protein domain (MCP), a non-natural RNA aptamer ligand that binds a corresponding RNA motif/aptamer, a parathyroid hormone dimerization domain, a PP7 coat protein (PCP) domain, a PSD95-Dlgl-zo-1 (PDZ) domain, a PYL domain, a SNAP tag, a SpyCatcher moiety, a SpyTag moiety, a streptavidin domain, a streptavidin-binding protein domain, a streptavidin binding protein (SBP) domain, a telomerase Sm7 protein domain (e.g. Sm7 homoheptamer or a monomeric Sm-like protein), and/or fragments thereof. In embodiments, an additional heterologous portion comprises a polynucleotide (e.g., an RNA motif), such as an MS2 phage operator stem-loop (e.g. an MS2, an MS2 C-5 mutant, or an MS2 F-5 mutant), a non-natural RNA motif, a PP7 operator stem-loop, an SfMu phate Com stem-loop, a steril alpha motif, a telomerase Ku binding motif, a telomerase Sm7 binding motif, and/or fragments thereof. Non-limiting examples of additional heterologous portions include polypeptides with at least about 85% sequence identity to any one or more of SEQ ID NOs: 380, 382, 384, 386-388, or fragments thereof. Non-limiting examples of additional heterologous portions include polynucleotides with at least about 85% sequence identity to any one or more of SEQ ID NOs: 379, 381, 383, 385, or fragments thereof.

[0718] In some instances, components of the base editing system are associated with one another through the interaction of leucine zipper domains (e.g., SEQ ID NOs: 387 and 388). In some cases, components of the base editing system are associated with one another through polypeptide domains (e.g., FokI domains) that associate to form protein complexes containing about, at least about, or no more than about 1, 2 (i.e., dimerize), 3, 4, 5, 6, 7, 8, 9, 10 polypeptide domain units, optionally the polypeptide domains may include alterations that reduce or eliminate an activity thereof.

[0719] In some instances, components of the base editing system are associated with one another through the interaction of multimeric antibodies or fragments thereof (e.g., IgG, IgD, IgA, IgM, IgE, a heavy chain domain 2 (CH2) of IgM (MHD2) or IgE (EHD2), an immunoglobulin Fc region, a heavy chain domain 3 (CH3) of IgG or IgA, a heavy chain domain 4 (CH4) of IgM or IgE, an Fab, and an Fab2). In some instances, the antibodies are dimeric, trimeric, or tetrameric. In embodiments, the dimeric antibodies bind a polypeptide or polynucleotide component of the base editing system.

[0720] In some cases, components of the base editing system are associated with one another through the interaction of a polynucleotide-binding protein domain(s) with a polynucleotide(s). In some instances, components of the base editing system are associated with one another through the interaction of one or more polynucleotide-binding protein domains with polynucleotides that are self complementary and/or complementary to one another so that complementary binding of the polynucleotides to one another brings into association their respective bound polynucleotide-binding protein domain(s).

[0721] In some instances, components of the base editing system are associated with one another through the interaction of a polypeptide domain(s) with a small molecule(s) (e.g., chemical inducers of dimerization (CIDs), also known as “dimerizers”). Non-limiting examples of CIDs include those disclosed in Amara, et al., “A versatile synthetic dimerizer for the regulation of protein-protein interactions,” PNAS, 94:10618-10623 (1997); and Voβ, et al. “Chemically induced dimerization: reversible and spatiotemporal control of protein function in cells,” Current Opinion in Chemical Biology, 28:194-201 (2015), the disclosures of each of which are incorporated herein by reference in their entireties for all purposes. Non-limiting examples of polypeptides that can dimerize and their corresponding dimerizing agents are provided in Table 10.1 below.

TABLE 10.1
Chemically induced dimerization systems.

| | |
|---|---|
| Dimerizing Polypeptides | Dimerizing agent |

| | | |
|---|---|---|
| FKBP | FKBP | FK1012 |
| FKBP | Calcineurin A (CNA) | FK506 |
| FKBP | CyP-Fas | FKCsA |
| FKBP | FRB (FKBP-rapamycin- | Rapamycin |
| | binding) domain of mTOR | |
| GyrB | GyrB | Coumermycin |
| GAI | GID1 (gibberellin insensitive | Gibberellin |
| | dwarf 1) | |
| ABI | PYL | Abscisic acid |
| ABI | PYRMandi | Mandipropamid |
| SNAP-tag | HaloTag | HaXS |
| eDHFR | HaloTag | TMP-HTag |
| Bcl-xL | Fab (AZ1) | ABT-737 |

[0722] In embodiments, the additional heterologous portion is part of a guide RNA molecule. In some instances, the additional heterologous portion contains or is an RNA motif. The RNA motif may be positioned at the 5′ or 3′ end of the guide RNA molecule or various positions of a guide RNA molecule. In embodiments, the RNA motif is positioned within the guide RNA to reduce steric hindrance, optionally where such hindrance is associated with other bulky loops of an RNA scaffold. In some instances, it is advantageous to link the RNA motif is linked to other portions of the guide RNA by way of a linker, where the linker can be about, at least about, or no more than about 1, 2, 3, 4, 5, 6, 7, 8, 9, 10, or more nucleotides in length. Optionally, the linker contains a GC-rich nucleotide sequence. The guide RNA can contain 1, 2, 3, 4, 5, or more copies of the RNA motif, optionally where they are positioned consecutively, and/or optionally where they are each separated from one another by a linker(s). The RNA motif may include any one or more of the polynucleotide modifications described herein. Non-limiting examples of suitable modifications to the RNA motif include 2′ deoxy-2-aminopurine, 2′ribose-2-aminopurine, phosphorothioate mods, 2′-Omethyl mods, 2′-Fluro mods and LNA mods. Advantageously, the modifications help to increase stability and promote stronger bonds/folding structure of a hairpin(s) formed by the RNA motif.

[0723] In some embodiments, the RNA motif is modified to include an extension. In embodiments, the extension contains about, at least about, or no more than about 2, 3, 4, 5, 10, 15, 20, or 25 nucleotides. In some instances, the extension results in an alteration in the length of a stem formed by the RNA motif (e.g., a lengthening or a shortening). It can be advantageous for a stem formed by the RNA motif to be about, at least about, or no more than about 5, 10, 15, 20, 25, 30, 35, 40, 45, 50, 55, 60, 65, 70, 75, 80, 85, 90, 95, or 100 nucleotides in length. In various embodiments, the extension increases flexibility of the RNA motif and/or increases binding with a corresponding RNA motif.

[0724] In some embodiments, the base editor inhibits base excision repair (BER) of the edited strand. In some embodiments, the base editor protects or binds the non-edited strand. In some embodiments, the base editor comprises UGI activity or USP activity. In some embodiments, the base editor comprises a catalytically inactive inosine-specific nuclease. In some embodiments, the base editor comprises nickase activity. In some embodiments, the intended edit of base pair is upstream of a PAM site. In some embodiments, the intended edit of base pair is 1, 2, 3, 4, 5, 6, 7, 8, 9, 10, 11, 12, 13, 14, 15, 16, 17, 18, 19, or 20 nucleotides upstream of the PAM site. In some embodiments, the intended edit of base-pair is downstream of a PAM site. In some embodiments, the intended edited base pair is 1, 2, 3, 4, 5, 6, 7, 8, 9, 10, 11, 12, 13, 14, 15, 16, 17, 18, 19, or 20 nucleotides downstream stream of the PAM site.

[0725] In some embodiments, the method does not require a canonical (e.g., NGG) PAM site. In some embodiments, the nucleobase editor comprises a linker or a spacer. In some embodiments, the linker or spacer is 1-25 amino acids in length. In some embodiments, the linker or spacer is 5-20 amino acids in length. In some embodiments, the linker or spacer is 10, 11, 12, 13, 14, 15, 16, 17, 18, 19, or 20 amino acids in length.

[0726] In some embodiments, the base editing fusion proteins or complexes provided herein need to be positioned at a precise location, for example, where a target base is placed within a defined region (e.g., a “deamination window”). In some embodiments, a target can be within a 4 base region. In some embodiments, such a defined target region can be approximately 15 bases upstream of the PAM. See Komor, A. C., et al., “Programmable editing of a target base in genomic DNA without double-stranded DNA cleavage” Nature 533, 420-424 (2016); Gaudelli, N. M., et al., “Programmable base editing of A•T to G•C in genomic DNA without DNA cleavage” Nature 551, 464-471 (2017); and Komor, A. C., et al., “Improved base excision repair inhibition and bacteriophage Mu Gam protein yields C:G-to-T:A base editors with higher efficiency and product purity” Science Advances 3:eaao4774 (2017), the entire contents of which are hereby incorporated by reference.

[0727] In some embodiments, the target region comprises a target window, wherein the target window comprises the target nucleobase pair. In some embodiments, the target window comprises 1-10 nucleotides. In some embodiments, the target window is 1, 2, 3, 4, 5, 6, 7, 8, 9, 10, 11, 12, 13, 14, 15, 16, 17, 18, 19, or 20 nucleotides in length. In some embodiments, the intended edit of base pair is within the target window. In some embodiments, the target window comprises the intended edit of base pair. In some embodiments, the method is performed using any of the base editors provided herein. In some embodiments, a target window is a deamination window. A deamination window can be the defined region in which a base editor acts upon and deaminates a target nucleotide. In some embodiments, the deamination window is within a 2, 3, 4, 5, 6, 7, 8, 9, or 10 base regions. In some embodiments, the deamination window is 5, 6, 7, 8, 9, 10, 11, 12, 13, 14, 15, 16, 17, 18, 19, 20, 21, 22, 23, 24, or 25 bases upstream of the PAM.

[0728] The base editors of the present disclosure can comprise any domain, feature or amino acid sequence which facilitates the editing of a target polynucleotide sequence. For example, in some embodiments, the base editor comprises a nuclear localization sequence (NLS). In some embodiments, an NLS of the base editor is localized between a deaminase domain and a polynucleotide programmable nucleotide binding domain. In some embodiments, an NLS of the base editor is localized C-terminal to a polynucleotide programmable nucleotide binding domain.

[0729] Protein domains included in the fusion protein can be a heterologous functional domain. Non-limiting examples of protein domains which can be included in the fusion protein include a deaminase domain (e.g., cytidine deaminase and/or adenosine deaminase), a uracil glycosylase inhibitor (UGI) domain, epitope tags, and reporter gene sequences. Protein domains can be a heterologous functional domain, for example, having one or more of the following activities: transcriptional activation activity, transcriptional repression activity, transcription release factor activity, gene silencing activity, chromatin modifying activity, epigenetic modifying activity, histone modification activity, RNA cleavage activity, and nucleic acid binding activity. Such heterologous functional domains can confer a function activity, such as modification of a target polypeptide associated with target DNA (e.g., a histone, a DNA binding protein, etc.), leading to, for example, histone methylation, histone acetylation, histone ubiquitination, and the like. Other functions and/or activities conferred can include transposase activity, integrase activity, recombinase activity, ligase activity, ubiquitin ligase activity, deubiquitinating activity, adenylation activity, deadenylation activity, methyltransferase activity, demethylase activity, acetyltransferase activity, deacetylase activity, kinase activity, phosphatase activity, ribosylation activity, deribosylation activity, myristoylation activity, demyristoylation activity, polymerase activity, helicase activity, or nuclease activity, SUMOylation activity, deSUMOylation activity, or any combination of the above. In some embodiments, the Cas9 protein is fused to a histone demethylase, a transcriptional activator or a deaminase.

[0730] Further suitable fusion partners include, but are not limited to boundary elements (e.g., CTCF), proteins and fragments thereof that provide periphery recruitment (e.g., Lamin A, Lamin B, etc.), and protein docking elements (e.g., FKBP/FRB, Pill/Abyl, etc.).

[0731] A domain may be detected or labeled with an epitope tag, a reporter protein, other binding domains. Non-limiting examples of epitope tags include histidine (His) tags, V5 tags, FLAG tags, influenza hemagglutinin (HA) tags, Myc tags, VSV-G tags, and thioredoxin (Trx) tags. Examples of reporter genes include, but are not limited to, glutathione-5-transferase (GST), horseradish peroxidase (HRP), chloramphenicol acetyltransferase (CAT) beta-galactosidase, beta-glucuronidase, luciferase, green fluorescent protein (GFP), HcRed, DsRed, cyan fluorescent protein (CFP), yellow fluorescent protein (YFP), and autofluorescent proteins including blue fluorescent protein (BFP). Additional protein sequences can include amino acid sequences that bind DNA molecules or bind other cellular molecules, including but not limited to maltose binding protein (MBP), S-tag, Lex A DNA binding domain (DBD) fusions, GAL4 DNA binding domain fusions, and herpes simplex virus (HSV) BP16 protein fusions.

[0732] Other exemplary features that can be present in a base editor as disclosed herein are localization sequences, such as cytoplasmic localization sequences, export sequences, such as nuclear export sequences, or other localization sequences, as well as sequence tags that are useful for solubilization, purification, or detection of the fusion proteins or complexes. Suitable protein tags provided herein include, but are not limited to, biotin carboxylase carrier protein (BCCP) tags, myc-tags, calmodulin-tags, FLAG-tags, hemagglutinin (HA)-tags, polyhistidine tags, also referred to as histidine tags or His-tags, maltose binding protein (MBP)-tags, nus-tags, glutathione-S-transferase (GST)-tags, green fluorescent protein (GFP)-tags, thioredoxin-tags, S-tags, Softags (e.g., Softag 1, Softag 3), strep-tags, biotin ligase tags, FlAsH tags, V5 tags, and SBP-tags. Additional suitable sequences will be apparent to those of skill in the art. In some embodiments, the fusion protein or complex comprises one or more His tags.

[0733] In some embodiments, non-limiting exemplary cytidine base editors (CBE) include BE1 (APOBEC1-XTEN-dCas9), BE2 (APOBEC1-XTEN-dCas9-UGI), BE3 (APOBEC1-XTEN-dCas9(A840H)-UGI), BE3-Gam, saBE3, saBE4-Gam, BE4, BE4-Gam, saBE4, or saB4E-Gam. BE4 extends the APOBEC1-Cas9n(D10A) linker to 32 amino acids and the Cas9n-UGI linker to 9 amino acids, and appends a second copy of UGI to the C-terminus of the construct with another 9-amino acid linker into a single base editor construct. The base editors saBE3 and saBE4 have the S. pyogenes Cas9n(D10A) replaced with the smaller S. aureus Cas9n(D10A). BE3-Gam, saBE3-Gam, BE4-Gam, and saBE4-Gam have 174 residues of Gam protein fused to the N-terminus of BE3, saBE3, BE4, and saBE4 via the 16 amino acid XTEN linker.

[0734] In some embodiments, the adenosine base editor (ABE) can deaminate adenine in DNA. In some embodiments, ABE is generated by replacing APOBEC1 component of BE3 with natural or engineered E. coli TadA, human ADAR2, mouse ADA, or human ADAT2. In some embodiments, ABE comprises evolved TadA variant. In some embodiments, the ABE is ABE 1.2 (TadA*-XTEN-nCas9-NLS). In some embodiments, TadA* comprises A106V and D108N mutations.

[0735] In some embodiments, the ABE is a second-generation ABE. In some embodiments, the ABE is ABE2.1, which comprises additional mutations D147Y and E155V in TadA* (TadA*2.1). In some embodiments, the ABE is ABE2.2, ABE2.1 fused to catalytically inactivated version of human alkyl adenine DNA glycosylase (AAG with E125Q mutation). In some embodiments, the ABE is ABE2.3, ABE2.1 fused to catalytically inactivated version of E. coli Endo V (inactivated with D35A mutation). In some embodiments, the ABE is ABE2.6 which has a linker twice as long (32 amino acids, (SGGS)₂ (SEQ ID NO: 330)-XTEN-(SGGS)₂ (SEQ ID NO: 330)) as the linker in ABE2.1. In some embodiments, the ABE is ABE2.7, which is ABE2.1 tethered with an additional wild-type TadA monomer. In some embodiments, the ABE is ABE2.8, which is ABE2.1 tethered with an additional TadA*2.1 monomer. In some embodiments, the ABE is ABE2.9, which is a direct fusion of evolved TadA (TadA*2.1) to the N-terminus of ABE2.1. In some embodiments, the ABE is ABE2.10, which is a direct fusion of wild-type TadA to the N-terminus of ABE2.1. In some embodiments, the ABE is ABE2.11, which is ABE2.9 with an inactivating E59A mutation at the N-terminus of TadA* monomer. In some embodiments, the ABE is ABE2.12, which is ABE2.9 with an inactivating E59A mutation in the internal TadA* monomer.

[0736] In some embodiments, the ABE is a third generation ABE. In some embodiments, the ABE is ABE3.1, which is ABE2.3 with three additional TadA mutations (L84F, H123Y, and I156F).

[0737] In some embodiments, the ABE is a fourth generation ABE. In some embodiments, the ABE is ABE4.3, which is ABE3.1 with an additional TadA mutation A142N (TadA*4.3).

[0738] In some embodiments, the ABE is a fifth generation ABE. In some embodiments, the ABE is ABE5.1, which is generated by importing a consensus set of mutations from surviving clones (H36L, R51L, S146C, and K157N) into ABE3.1. In some embodiments, the ABE is ABE5.3, which has a heterodimeric construct containing wild-type E. coli TadA fused to an internal evolved TadA*. In some embodiments, the ABE is ABE5.2, ABE5.4, ABE5.5, ABE5.6, ABE5.7, ABE5.8, ABE5.9, ABE5.10, ABE5.11, ABE5.12, ABE5.13, or ABE5.14, as shown in Table 11 below. In some embodiments, the ABE is a sixth generation ABE. In some embodiments, the ABE is ABE6.1, ABE6.2, ABE6.3, ABE6.4, ABE6.5, or ABE6.6, as shown in Table 11 below. In some embodiments, the ABE is a seventh generation ABE. In some embodiments, the ABE is ABE7.1, ABE7.2, ABE7.3, ABE7.4, ABE7.5, ABE7.6, ABE7.7, ABE7.8, ABE7.9, or ABE7.10, as shown in Table 11 below.

TABLE 11
Genotypes of ABEs

| | 23 | 26 | 36 | 37 | 48 | 49 | 51 | 72 | 84 | 87 | 106 | 108 | 123 | 125 | 142 | 146 | 147 | 152 | 155 | 156 | 157 | 161 |
|---|---|---|---|---|---|---|---|---|---|---|---|---|---|---|---|---|---|---|---|---|---|---|
| ABE0.1 | W | R | H | N | P | | R | N | L | S | A | D | H | G | A | S | D | R | E | I | K | K |
| ABE0.2 | W | R | H | N | P | | R | N | L | S | A | D | H | G | A | S | D | R | E | I | K | K |
| ABE1.1 | W | R | H | N | P | | R | N | L | S | A | N | H | G | A | S | D | R | E | I | K | K |
| ABE1.2 | W | R | H | N | P | | R | N | L | S | V | N | H | G | A | S | D | R | E | I | K | K |
| ABE2.1 | W | R | H | N | P | | R | N | L | S | V | N | H | G | A | S | Y | R | V | I | K | K |
| ABE2.2 | W | R | H | N | P | | R | N | L | S | V | N | H | G | A | S | Y | R | V | I | K | K |
| ABE2.3 | W | R | H | N | P | | R | N | L | S | V | N | H | G | A | S | Y | R | V | I | K | K |
| ABE2.4 | W | R | H | N | P | | R | N | L | S | V | N | H | G | A | S | Y | R | V | I | K | K |
| ABE2.5 | W | R | H | N | P | | R | N | L | S | V | N | H | G | A | S | Y | R | V | I | K | K |
| ABE2.6 | W | R | H | N | P | | R | N | L | S | V | N | H | G | A | S | Y | R | V | I | K | K |
| ABE2.7 | W | R | H | N | P | | R | N | L | S | V | N | H | G | A | S | Y | R | V | I | K | K |
| ABE2.8 | W | R | H | N | P | | R | N | L | S | V | N | H | G | A | S | Y | R | V | I | K | K |
| ABE2.9 | W | R | H | N | P | | R | N | L | S | V | N | H | G | A | S | Y | R | V | I | K | K |
| ABE2.10 | W | R | H | N | P | | R | N | L | S | V | N | H | G | A | S | Y | R | V | I | K | K |
| ABE2.11 | W | R | H | N | P | | R | N | L | S | V | N | H | G | A | S | Y | R | V | I | K | K |
| ABE2.12 | W | R | H | N | P | | R | N | L | S | V | N | Y | G | A | S | Y | R | V | I | K | K |
| ABE3.1 | W | R | H | N | P | | R | N | F | S | V | N | Y | G | A | S | Y | R | V | F | K | K |
| ABE3.2 | W | R | H | N | P | | R | N | F | S | V | N | Y | G | A | S | Y | R | V | F | K | K |
| ABE3.3 | W | R | H | N | P | | R | N | F | S | V | N | Y | G | A | S | Y | R | V | F | K | K |
| ABE3.4 | W | R | H | N | P | | R | N | F | S | V | N | Y | G | A | S | Y | R | V | F | K | K |
| ABE3.5 | W | R | H | N | P | | R | N | F | S | V | N | Y | G | A | S | Y | R | V | F | K | K |
| ABE3.6 | W | R | H | N | P | | R | N | F | S | V | N | Y | G | A | S | Y | R | V | F | K | K |
| ABE3.7 | W | R | H | N | P | | R | N | F | S | V | N | Y | G | A | S | Y | R | V | F | K | K |
| ABE3.8 | W | R | H | N | P | | R | N | F | S | V | N | Y | G | A | S | Y | R | V | F | K | K |
| ABE4.1 | W | R | H | N | P | | R | N | L | S | V | N | H | G | N | S | Y | R | V | I | K | K |
| ABE4.2 | W | G | H | N | P | | R | N | L | S | V | N | H | G | N | S | Y | R | V | I | K | K |
| ABE4.3 | W | R | H | N | P | | R | N | F | S | V | N | Y | G | N | S | Y | R | V | F | K | K |
| ABE5.1 | W | R | L | N | P | | L | N | F | S | V | N | Y | G | A | C | Y | R | V | F | N | K |
| ABE5.2 | W | R | H | S | P | | R | N | F | S | V | N | Y | G | A | S | Y | R | V | F | K | T |
| ABE5.3 | W | R | L | N | P | | L | N | I | S | V | N | Y | G | A | C | Y | R | V | F | N | K |
| ABE5.4 | W | R | H | S | P | | R | N | F | S | V | N | Y | G | A | S | Y | R | V | F | K | T |
| ABE5.5 | W | R | L | N | P | | L | N | F | S | V | N | Y | G | A | C | Y | R | V | F | N | K |
| ABE5.6 | W | R | L | N | P | | L | N | F | S | V | N | Y | G | A | C | Y | R | V | F | N | K |
| ABE5.7 | W | R | L | N | P | | L | N | F | S | V | N | Y | G | A | C | Y | R | V | F | N | K |
| ABE5.8 | W | R | L | N | P | | L | N | F | S | V | N | Y | G | A | C | Y | R | V | F | N | K |
| ABE5.9 | W | R | L | N | P | | L | N | F | S | V | N | Y | G | A | C | Y | R | V | F | N | K |
| ABE5.10 | W | R | L | N | P | | L | N | F | S | V | N | Y | G | A | C | Y | R | V | F | N | K |
| ABE5.11 | W | R | L | N | P | | L | N | F | S | V | N | Y | G | A | C | Y | R | V | F | N | K |
| ABE5.12 | W | R | L | N | P | | L | N | F | S | V | N | Y | G | A | C | Y | R | V | F | N | K |
| ABE5.13 | W | R | H | N | P | | L | D | F | S | V | N | Y | A | A | S | Y | R | V | F | K | K |
| ABE5.14 | W | R | H | N | S | | L | N | F | C | V | N | Y | G | A | S | Y | R | V | F | K | K |
| ABE6.1 | W | R | H | N | S | | L | N | F | S | V | N | Y | G | N | S | Y | R | V | F | K | K |
| ABE6.2 | W | R | H | N | T | V | L | N | F | S | V | N | Y | G | N | S | Y | R | V | F | N | K |
| ABE6.3 | W | R | L | N | S | | L | N | F | S | V | N | Y | G | A | C | Y | R | V | F | N | K |
| ABE6.4 | W | R | L | N | S | | L | N | F | S | V | N | Y | G | N | C | Y | R | V | F | N | K |
| ABE6.5 | W | R | L | N | T | V | L | N | F | S | V | N | Y | G | A | C | Y | R | V | F | N | K |
| ABE6.6 | W | R | L | N | T | V | L | N | F | S | V | N | Y | G | N | C | Y | R | V | F | N | K |
| ABE7.1 | W | R | L | N | A | | L | N | F | S | V | N | Y | G | A | C | Y | R | V | F | N | K |
| ABE7.2 | W | R | L | N | A | | L | N | F | S | V | N | Y | G | N | C | Y | R | V | F | N | K |
| ABE7.3 | L | R | L | N | A | | L | N | F | S | V | N | Y | G | A | C | Y | R | V | F | N | K |
| ABE7.4 | R | R | L | N | A | | L | N | F | S | V | N | Y | G | A | C | Y | R | V | F | N | K |
| ABE7.5 | W | R | L | N | A | | L | N | F | S | V | N | Y | G | A | C | Y | H | V | F | N | K |
| ABE7.6 | W | R | L | N | A | | L | N | I | S | V | N | Y | G | A | C | Y | P | V | F | N | K |
| ABE7.7 | L | R | L | N | A | | L | N | F | S | V | N | Y | G | A | C | Y | P | V | F | N | K |
| ABE7.8 | L | R | L | N | A | | L | N | F | S | V | N | Y | G | N | C | Y | R | V | F | N | K |
| ABE7.9 | L | R | L | N | A | | L | N | F | S | V | N | Y | G | N | C | Y | P | V | F | N | K |
| ABE7.10 | R | R | L | N | A | | L | N | F | S | V | N | Y | G | A | C | Y | P | V | F | N | K |

[0739] In some embodiments, the base editor is an eighth generation ABE (ABE8). In some embodiments, the ABE8 contains a TadA*8 variant. In some embodiments, the ABE8 has a monomeric construct containing a TadA*8 variant (“ABE8.x-m”). In some embodiments, the ABE8 is ABE8.1-m, which has a monomeric construct containing TadA*7.10 with a Y147T mutation (TadA*8.1). In some embodiments, the ABE8 is ABE8.2-m, which has a monomeric construct containing TadA*7.10 with a Y147R mutation (TadA*8.2). In some embodiments, the ABE8 is ABE8.3-m, which has a monomeric construct containing TadA*7.10 with a Q154S mutation (TadA*8.3). In some embodiments, the ABE8 is ABE8.4-m, which has a monomeric construct containing TadA*7.10 with a Y123H mutation (TadA*8.4). In some embodiments, the ABE8 is ABE8.5-m, which has a monomeric construct containing TadA*7.10 with a V82S mutation (TadA*8.5). In some embodiments, the ABE8 is ABE8.6-m, which has a monomeric construct containing TadA*7.10 with a T166R mutation (TadA*8.6). In some embodiments, the ABE8 is ABE8.7-m, which has a monomeric construct containing TadA*7.10 with a Q154R mutation (TadA*8.7). In some embodiments, the ABE8 is ABE8.8-m, which has a monomeric construct containing TadA*7.10 with Y147R, Q154R, and Y123H mutations (TadA*8.8). In some embodiments, the ABE8 is ABE8.9-m, which has a monomeric construct containing TadA*7.10 with Y147R, Q154R and I76Y mutations (TadA*8.9). In some embodiments, the ABE8 is ABE8.10-m, which has a monomeric construct containing TadA*7.10 with Y147R, Q154R, and T166R mutations (TadA*8.10). In some embodiments, the ABE8 is ABE8.11-m, which has a monomeric construct containing TadA*7.10 with Y147T and Q154R mutations (TadA*8.11). In some embodiments, the ABE8 is ABE8.12-m, which has a monomeric construct containing TadA*7.10 with Y147T and Q154S mutations (TadA*8.12).

[0740] In some embodiments, the ABE8 is ABE8.13-m, which has a monomeric construct containing TadA*7.10 with Y123H (Y123H reverted from H123Y), Y147R, Q154R and I76Y mutations (TadA*8.13). In some embodiments, the ABE8 is ABE8.14-m, which has a monomeric construct containing TadA*7.10 with I76Y and V82S mutations (TadA*8.14). In some embodiments, the ABE8 is ABE8.15-m, which has a monomeric construct containing TadA*7.10 with V82S and Y147R mutations (TadA*8.15). In some embodiments, the ABE8 is ABE8.16-m, which has a monomeric construct containing TadA*7.10 with V82S, Y123H (Y123H reverted from H123Y) and Y147R mutations (TadA*8.16). In some embodiments, the ABE8 is ABE8.17-m, which has a monomeric construct containing TadA*7.10 with V82S and Q154R mutations (TadA*8.17). In some embodiments, the ABE8 is ABE8.18-m, which has a monomeric construct containing TadA*7.10 with V82S, Y123H (Y123H reverted from H123Y) and Q154R mutations (TadA*8.18). In some embodiments, the ABE8 is ABE8.19-m, which has a monomeric construct containing TadA*7.10 with V82S, Y123H (Y123H reverted from H123Y), Y147R and Q154R mutations (TadA*8.19). In some embodiments, the ABE8 is ABE8.20-m, which has a monomeric construct containing TadA*7.10 with I76Y, V82S, Y123H (Y123H reverted from H123Y), Y147R and Q154R mutations (TadA*8.20). In some embodiments, the ABE8 is ABE8.21-m, which has a monomeric construct containing TadA*7.10 with Y147R and Q154S mutations (TadA*8.21). In some embodiments, the ABE8 is ABE8.22-m, which has a monomeric construct containing TadA*7.10 with V82S and Q154S mutations (TadA*8.22). In some embodiments, the ABE8 is ABE8.23-m, which has a monomeric construct containing TadA*7.10 with V82S and Y123H (Y123H reverted from H123Y) mutations (TadA*8.23). In some embodiments, the ABE8 is ABE8.24-m, which has a monomeric construct containing TadA*7.10 with V82S, Y123H (Y123H reverted from H123Y), and Y147T mutations (TadA*8.24).

[0741] In some embodiments, the ABE8 has a heterodimeric construct containing wild-type E. coli TadA fused to a TadA*8 variant (“ABE8.x-d”). In some embodiments, the ABE8 is ABE8.1-d, which has a heterodimeric construct containing wild-type E. coli TadA fused to TadA*7.10 with a Y147T mutation (TadA*8.1). In some embodiments, the ABE8 is ABE8.2-d, which has a heterodimeric construct containing wild-type E. coli TadA fused to TadA*7.10 with a Y147R mutation (TadA*8.2). In some embodiments, the ABE8 is ABE8.3-d, which has a heterodimeric construct containing wild-type E. coli TadA fused to TadA*7.10 with a Q154S mutation (TadA*8.3). In some embodiments, the ABE8 is ABE8.4-d, which has a heterodimeric construct containing wild-type E. coli TadA fused to TadA*7.10 with a Y123H mutation (TadA*8.4). In some embodiments, the ABE8 is ABE8.5-d, which has a heterodimeric construct containing wild-type E. coli TadA fused to TadA*7.10 with a V82S mutation (TadA*8.5). In some embodiments, the ABE8 is ABE8.6-d, which has a heterodimeric construct containing wild-type E. coli TadA fused to TadA*7.10 with a T166R mutation (TadA*8.6). In some embodiments, the ABE8 is ABE8.7-d, which has a heterodimeric construct containing wild-type E. coli TadA fused to TadA*7.10 with a Q154R mutation (TadA*8.7). In some embodiments, the ABE8 is ABE8.8-d, which has a heterodimeric construct containing wild-type E. coli TadA fused to TadA*7.10 with Y147R, Q154R, and Y123H mutations (TadA*8.8). In some embodiments, the ABE8 is ABE8.9-d, which has a heterodimeric construct containing wild-type E. coli TadA fused to TadA*7.10 with Y147R, Q154R and I76Y mutations (TadA*8.9). In some embodiments, the ABE8 is ABE8.10-d, which has a heterodimeric construct containing wild-type E. coli TadA fused to TadA*7.10 with Y147R, Q154R, and T166R mutations (TadA*8.10). In some embodiments, the ABE8 is ABE8.11-d, which has a heterodimeric construct containing wild-type E. coli TadA fused to TadA*7.10 with Y147T and Q154R mutations (TadA*8.11). In some embodiments, the ABE8 is ABE8.12-d, which has heterodimeric construct containing wild-type E. coli TadA fused to TadA*7.10 with Y147T and Q154S mutations (TadA*8.12). In some embodiments, the ABE8 is ABE8.13-d, which has a heterodimeric construct containing wild-type E. coli TadA fused to TadA*7.10 with Y123H (Y123H reverted from H123Y), Y147R, Q154R and I76Y mutations (TadA*8.13). In some embodiments, the ABE8 is ABE8.14-d, which has a heterodimeric construct containing wild-type E. coli TadA fused to TadA*7.10 with I76Y and V82S mutations (TadA*8.14). In some embodiments, the ABE8 is ABE8.15-d, which has a heterodimeric construct containing wild-type E. coli TadA fused to TadA*7.10 with V82S and Y147R mutations (TadA*8.15). In some embodiments, the ABE8 is ABE8.16-d, which has a heterodimeric construct containing wild-type E. coli TadA fused to TadA*7.10 with V82S, Y123H (Y123H reverted from H123Y) and Y147R mutations (TadA*8.16). In some embodiments, the ABE8 is ABE8.17-d, which has a heterodimeric construct containing wild-type E. coli TadA fused to TadA*7.10 with V82S and Q154R mutations (TadA*8.17). In some embodiments, the ABE8 is ABE8.18-d, which has a heterodimeric construct containing wild-type E. coli TadA fused to TadA*7.10 with V82S, Y123H (Y123H reverted from H123Y) and Q154R mutations (TadA*8.18). In some embodiments, the ABE8 is ABE8.19-d, which has a heterodimeric construct containing wild-type E. coli TadA fused to TadA*7.10 with V82S, Y123H (Y123H reverted from H123Y), Y147R and Q154R mutations (TadA*8.19). In some embodiments, the ABE8 is ABE8.20-d, which has a heterodimeric construct containing wild-type E. coli TadA fused to TadA*7.10 with I76Y, V82S, Y123H (Y123H reverted from H123Y), Y147R and Q154R mutations (TadA*8.20). In some embodiments, the ABE8 is ABE8.21-d, which has a heterodimeric construct containing wild-type E. coli TadA fused to TadA*7.10 with Y147R and Q154S mutations (TadA*8.21). In some embodiments, the ABE8 is ABE8.22-d, which has a heterodimeric construct containing wild-type E. coli TadA fused to TadA*7.10 with V82S and Q154S mutations (TadA*8.22). In some embodiments, the ABE8 is ABE8.23-d, which has a heterodimeric construct containing wild-type E. coli TadA fused to TadA*7.10 with V82S and Y123H (Y123H reverted from H123Y) mutations (TadA*8.23). In some embodiments, the ABE8 is ABE8.24-d, which has a heterodimeric construct containing wild-type E. coli TadA fused to TadA*7.10 with V82S, Y123H (Y123H reverted from H123Y), and Y147T mutations (TadA*8.24).

[0742] In some embodiments, the ABE8 has a heterodimeric construct containing TadA*7.10 fused to a TadA*8 variant (“ABE8.x-7”). In some embodiments, the ABE8 is ABE8.1-7, which has a heterodimeric construct containing TadA*7.10 fused to TadA*7.10 with a Y147T mutation (TadA*8.1). In some embodiments, the ABE8 is ABE8.2-7, which has a heterodimeric construct containing TadA*7.10 fused to TadA*7.10 with a Y147R mutation (TadA*8.2). In some embodiments, the ABE8 is ABE8.3-7, which has a heterodimeric construct containing TadA*7.10 fused to TadA*7.10 with a Q154S mutation (TadA*8.3). In some embodiments, the ABE8 is ABE8.4-7, which has a heterodimeric construct containing TadA*7.10 fused to TadA*7.10 with a Y123H mutation (TadA*8.4). In some embodiments, the ABE8 is ABE8.5-7, which has a heterodimeric construct containing TadA*7.10 fused to TadA*7.10 with a V82S mutation (TadA*8.5). In some embodiments, the ABE8 is ABE8.6-7, which has a heterodimeric construct containing TadA*7.10 fused to TadA*7.10 with a T166R mutation (TadA*8.6). In some embodiments, the ABE8 is ABE8.7-7, which has a heterodimeric construct containing TadA*7.10 fused to TadA*7.10 with a Q154R mutation (TadA*8.7). In some embodiments, the ABE8 is ABE8.8-7, which has a heterodimeric construct containing TadA*7.10 fused to TadA*7.10 with Y147R, Q154R, and Y123H mutations (TadA*8.8). In some embodiments, the ABE8 is ABE8.9-7, which has a heterodimeric construct containing TadA*7.10 fused to TadA*7.10 with Y147R, Q154R and I76Y mutations (TadA*8.9). In some embodiments, the ABE8 is ABE8.10-7, which has a heterodimeric construct containing TadA*7.10 fused to TadA*7.10 with Y147R, Q154R, and T166R mutations (TadA*8.10). In some embodiments, the ABE8 is ABE8.11-7, which has a heterodimeric construct containing TadA*7.10 fused to TadA*7.10 with Y147T and Q154R mutations (TadA*8.11). In some embodiments, the ABE8 is ABE8.12-7, which has a heterodimeric construct containing TadA*7.10 fused to TadA*7.10 with Y147T and Q154S mutations (TadA*8.12). In some embodiments, the ABE8 is ABE8.13-7, which has a heterodimeric construct containing TadA*7.10 fused to TadA*7.10 with Y123H (Y123H reverted from H123Y), Y147R, Q154R and I76Y mutations (TadA*8.13). In some embodiments, the ABE8 is ABE8.14-7, which has a heterodimeric construct containing TadA*7.10 fused to TadA*7.10 with I76Y and V82S mutations (TadA*8.14). In some embodiments, the ABE8 is ABE8.15-7, which has a heterodimeric construct containing TadA*7.10 fused to TadA*7.10 with V82S and Y147R mutations (TadA*8.15). In some embodiments, the ABE8 is ABE8.16-7, which has a heterodimeric construct containing TadA*7.10 fused to TadA*7.10 with V82S, Y123H (Y123H reverted from H123Y) and Y147R mutations (TadA*8.16). In some embodiments, the ABE8 is ABE8.17-7, which has a heterodimeric construct containing TadA*7.10 fused to TadA*7.10 with V82S and Q154R mutations (TadA*8.17). In some embodiments, the ABE8 is ABE8.18-7, which has a heterodimeric construct containing TadA*7.10 fused to TadA*7.10 with V82S, Y123H (Y123H reverted from H123Y) and Q154R mutations (TadA*8.18). In some embodiments, the ABE8 is ABE8.19-7, which has a heterodimeric construct containing TadA*7.10 fused to TadA*7.10 with V82S, Y123H (Y123H reverted from H123Y), Y147R and Q154R mutations (TadA*8.19). In some embodiments, the ABE8 is ABE8.20-7, which has a heterodimeric construct containing TadA*7.10 fused to TadA*7.10 with I76Y, V82S, Y123H (Y123H reverted from H123Y), Y147R and Q154R mutations (TadA*8.20). In some embodiments, the ABE8 is ABE8.21-7, which has a heterodimeric construct containing TadA*7.10 fused to TadA*7.10 with Y147R and Q154S mutations (TadA*8.21). In some embodiments, the ABE8 is ABE8.22-7, which has a heterodimeric construct containing TadA*7.10 fused to TadA*7.10 with V82S and Q154S mutations (TadA*8.22). In some embodiments, the ABE8 is ABE8.23-7, which has a heterodimeric construct containing TadA*7.10 fused to TadA*7.10 with V82S and Y123H (Y123H reverted from H123Y) mutations (TadA*8.23). In some embodiments, the ABE8 is ABE8.24-7, which has a heterodimeric construct containing TadA*7.10 fused to TadA*7.10 with V82S, Y123H (Y123H reverted from H123Y), and Y147T mutations (TadA*8.24).

[0743] In some embodiments, the ABE is ABE8.1-m, ABE8.2-m, ABE8.3-m, ABE8.4-m, ABE8.5-m, ABE8.6-m, ABE8.7-m, ABE8.8-m, ABE8.9-m, ABE8.10-m, ABE8.11-m, ABE8.12-m, ABE8.13-m, ABE8.14-m, ABE8.15-m, ABE8.16-m, ABE8.17-m, ABE8.18-m, ABE8.19-m, ABE8.20-m, ABE8.21-m, ABE8.22-m, ABE8.23-m, ABE8.24-m, ABE8.1-d, ABE8.2-d, ABE8.3-d, ABE8.4-d, ABE8.5-d, ABE8.6-d, ABE8.7-d, ABE8.8-d, ABE8.9-d, ABE8.10-d, ABE8.11-d, ABE8.12-d, ABE8.13-d, ABE8.14-d, ABE8.15-d, ABE8.16-d, ABE8.17-d, ABE8.18-d, ABE8.19-d, ABE8.20-d, ABE8.21-d, ABE8.22-d, ABE8.23-d, or ABE8.24-d as shown in Table 12 below.

TABLE 12
Adenosine Base Editor 8 (ABE8) Variants

| ABE8 | Adenosine Deaminase | Adenosine Deaminase Description |
|---|---|---|
| ABE8.1-m | TadA*8.1 | Monomer_TadA*7.10 + Y147T |
| ABE8.2-m | TadA*8.2 | Monomer_TadA*7.10 + Y147R |
| ABE8.3-m | TadA*8.3 | Monomer_TadA*7.10 + Q154S |
| ABE8.4-m | TadA*8.4 | Monomer_TadA*7.10 + Y123H |
| ABE8.5-m | TadA*8.5 | Monomer_TadA*7.10 + V82S |
| ABE8.6-m | TadA*8.6 | Monomer_TadA*7.10 + T166R |
| ABE8.7-m | TadA*8.7 | Monomer_TadA*7.10 + Q154R |
| ABE8.8-m | TadA*8.8 | Monomer_TadA*7.10 + Y147R_Q154R_Y123H |
| ABE8.9-m | TadA*8.9 | Monomer_TadA*7.10 + Y147R_Q154R_I76Y |
| ABE8.10-m | TadA*8.10 | Monomer_TadA*7.10 + Y147R_Q154R_T166R |
| ABE8.11-m | TadA*8.11 | Monomer_TadA*7.10 + Y147T_Q154R |
| ABE8.12-m | TadA*8.12 | Monomer_TadA*7.10 + Y147T_Q154S |
| ABE8.13-m | TadA*8.13 | Monomer_TadA*7.10 + |
| | | Y123H_Y147R_Q154R_I76Y |
| ABE8.14-m | TadA*8.14 | Monomer_TadA*7.10 + I76Y_V82S |
| ABE8.15-m | TadA*8.15 | Monomer_TadA*7.10 + V82S_Y147R |
| ABE8.16-m | TadA*8.16 | Monomer_TadA*7.10 + V82S_Y123H_Y147R |
| ABE8.17-m | TadA*8.17 | Monomer_TadA*7.10 + V82S_Q154R |
| ABE8.18-m | TadA*8.18 | Monomer_TadA*7.10 + V82S_Y123H_Q154R |
| ABE8.19-m | TadA*8.19 | Monomer_TadA*7.10 + |
| | | V82S_Y123H_Y147R_Q154R |
| ABE8.20-m | TadA*8.20 | Monomer_TadA*7.10 + |
| | | I76Y_V82S_Y123H_Y147R_Q154R |
| ABE8.21-m | TadA*8.21 | Monomer_TadA*7.10 + Y147R_Q154S |
| ABE8.22-m | TadA*8.22 | Monomer_TadA*7.10 + V82S_Q154S |
| ABE8.23-m | TadA*8.23 | Monomer_TadA*7.10 + V82S_Y123H |
| ABE8.24-m | TadA*8.24 | Monomer_TadA*7.10 + V82S_Y123H_Y147T |
| ABE8.1-d | TadA*8.1 | Heterodimer_(WT) + (TadA*7.10 + Y147T) |
| ABE8.2-d | TadA*8.2 | Heterodimer_(WT) + (TadA*7.10 + Y147R) |
| ABE8.3-d | TadA*8.3 | Heterodimer_(WT) + (TadA*7.10 + Q154S) |
| ABE8.4-d | TadA*8.4 | Heterodimer_(WT) + (TadA*7.10 + Y123H) |
| ABE8.5-d | TadA*8.5 | Heterodimer_(WT) + (TadA*7.10 + V82S) |
| ABE8.6-d | TadA*8.6 | Heterodimer_(WT) + (TadA*7.10 + T166R) |
| ABE8.7-d | TadA*8.7 | Heterodimer_(WT) + (TadA*7.10 + Q154R) |
| ABE8.8-d | TadA*8.8 | Heterodimer_(WT) + (TadA*7.10 + |
| | | Y147R_Q154R_Y123H) |
| ABE8.9-d | TadA*8.9 | Heterodimer_(WT) + (TadA*7.10 + |
| | | Y147R_Q154R_I76Y) |
| ABE8.10-d | TadA*8.10 | Heterodimer_(WT) + (TadA*7.10 + |
| | | Y147R_Q154R_T166R) |
| ABE8.11-d | TadA*8.11 | Heterodimer_(WT) + (TadA*7.10 + Y147T_Q154R) |
| ABE8.12-d | TadA*8.12 | Heterodimer_(WT) + (TadA*7.10 + Y147T_Q154S) |
| ABE8.13-d | TadA*8.13 | Heterodimer_(WT) + (TadA*7.10 + |
| | | Y123H_Y147T_Q154R_I76Y) |
| ABE8.14-d | TadA*8.14 | Heterodimer_(WT) + (TadA*7.10 + I76Y_V82S) |
| ABE8.15-d | TadA*8.15 | Heterodimer_(WT) + (TadA*7.10 + V82S_Y147R) |
| ABE8.16-d | TadA*8.16 | Heterodimer_(WT) + (TadA*7.10 + |
| | | V82S_Y123H_Y147R) |
| ABE8.17-d | TadA*8.17 | Heterodimer_(WT) + (TadA*7.10 + V82S_Q154R) |
| ABE8.18-d | TadA*8.18 | Heterodimer_(WT) + (TadA*7.10 + |
| | | V82S_Y123H_Q154R) |
| ABE8.19-d | TadA*8.19 | Heterodimer_(WT) + (TadA*7.10 + |
| | | V82S_Y123H_Y147R_Q154R) |
| ABE8.20-d | TadA*8.20 | Heterodimer_(WT) + (TadA*7.10 + |
| | | I76Y_V82S_Y123H_Y147R_Q154R) |
| ABE8.21-d | TadA*8.21 | Heterodimer_(WT) + (TadA*7.10 + Y147R_Q154S) |
| ABE8.22-d | TadA*8.22 | Heterodimer_(WT) + (TadA*7.10 + V82S_Q154S) |
| ABE8.23-d | TadA*8.23 | Heterodimer_(WT) + (TadA*7.10 + V82S_Y123H) |
| ABE8.24-d | TadA*8.24 | Heterodimer_(WT) + (TadA*7.10 + |
| | | V82S_Y123H_Y147T) |

[0744] In some embodiments, the ABE8 is ABE8a-m, which has a monomeric construct containing TadA*7.10 with R26C, A109S, T111R, D119N, H122N, Y1471D, F149Y, T166I, and D167N mutations (TadA*8a). In some embodiments, the ABE8 is ABE8b-m, which has a monomeric construct containing TadA*7.10 with V88A, A109S, T111R, D119N, H122N, F149Y, T166I, and D167N mutations (TadA*8b). In some embodiments, the ABE8 is ABE8c-m, which has a monomeric construct containing TadA*7.10 with R26C, A109S, T111R, D119N, H122N, F149Y, T166I, and D167N mutations (TadA*8c). In some embodiments, the ABE8 is ABE8d-m, which has a monomeric construct containing TadA*7.10 with V88A, T111R, D119N, and F149Y mutations (TadA*8d). In some embodiments, the ABE8 is ABE8e-m, which has a monomeric construct containing TadA*7.10 with A109S, T111R, D119N, H122N, Y147D, F149Y, T166I, and D167N mutations (TadA*8e).

[0745] In some embodiments, the ABE8 is ABE8a-d, which has a heterodimeric construct containing wild-type E. coli TadA fused to TadA*7.10 with R26C, A109S, T111R, D119, H122N, Y147D, F149Y, T166I, and D167N mutations (TadA*8a). In some embodiments, the ABE8 is ABE8b-d, which has a heterodimeric construct containing wild-type E. coli TadA fused to TadA*7.10 with V88A, A109S, T111R, D119N, H122N, F149Y, T166I, and D167N mutations (TadA*8b). In some embodiments, the ABE8 is ABE8c-d, which has a heterodimeric construct containing wild-type E. coli TadA fused to TadA*7.10 with R26C, A109S, T111R, D119N, H122N, F149Y, T166I, and D167N mutations (TadA*8c). In some embodiments, the ABE8 is ABE8d-d, which has a heterodimeric construct containing wild-type E. coli TadA fused to TadA*7.10 with V88A, T111R, D119N, and F149Y mutations (TadA*8d). In some embodiments, the ABE8 is ABE8e-d, which has a heterodimeric construct containing wild-type E. coli TadA fused to TadA*7.10 with A109S, T111R, D119N, H122N, Y147D, F149Y, T166I, and D167N mutations (TadA*8e).

[0746] In some embodiments, the ABE8 is ABE8a-7, which has a heterodimeric construct containing TadA*7.10 fused to TadA*7.10 with R26C, A109S, T111R, D119, H122N, Y147D, F149Y, T166I, and D167N mutations (TadA*8a). In some embodiments, the ABE8 is ABE8b-7, which has a heterodimeric construct containing TadA*7.10 fused to TadA*7.10 with V88A, A109S, T111R, D119N, H122N, F149Y, T166I, and D167N mutations (TadA*8b). In some embodiments, the ABE8 is ABE8c-7, which has a heterodimeric construct containing TadA*7.10 fused to TadA*7.10 with R26C, A109S, T111R, D119N, H122N, F149Y, T166I, and D167N mutations (TadA*8c). In some embodiments, the ABE8 is ABE8d-7, which has a heterodimeric construct containing TadA*7.10 fused to TadA*7.10 with V88A, T111R, D119N, and F149Y mutations (TadA*8d). In some embodiments, the ABE8 is ABE8e-7, which has a heterodimeric construct containing TadA*7.10 fused to TadA*7.10 with A109S, T111R, D119N, H122N, Y147D, F149Y, T166I, and D167N mutations (TadA*8e).

[0747] In some embodiments, the ABE is ABE8a-m, ABE8b-m, ABE8c-m, ABE8d-m, ABE8e-m, ABE8a-d, ABE8b-d, ABE8c-d, ABE8d-d, or ABE8e-d, as shown in Table 13 below. In some embodiments, the ABE is ABE8e-m or ABE8e-d. ABE8e shows efficient adenine base editing activity and low indel formation when used with Cas homologues other than SpCas9, for example, SaCas9, SaCas9-KKH, Cas12a homologues, e.g., LbCas12a, enAs-Cas12a, SpCas9-NG and circularly permuted CP1028-SpCas9 and CP1041-SpCas9. In addition to the mutations shown for ABE8e in Table 13, off-target RNA and DNA editing were reduced by introducing a V106W substitution into the TadA domain (as described in M. Richter et al., 2020, Nature Biotechnology, doi.org/10.1038/s41587-020-0453-z, the entire contents of which are incorporated by reference herein).

TABLE 13
Additional Adenosine Base Editor 8 Variants. In the table, “monomer”
indicates an ABE comprising a single TadA*7.10 comprising the indicated alterations
and “heterodimer” indicates an ABE comprising a TadA*7.10 comprising
the indicated alterations fused to an E. coli TadA adenosine deaminase.

| ABE8 Base | Adenosine | |
|---|---|---|
| Editor | Deaminase | Adenosine Deaminase Description |
| ABE8a-m | TadA*8a | Monomer_TadA*7.10 + R26C + A109S + T111R + D119N + |
| | | H122N + Y147D + F149Y + T166I + D167N |
| ABE8b-m | TadA*8b | Monomer_TadA*7.10 + V88A + A109S + T111R + D119N + |
| | | H122N + F149Y + T166I + D167N |
| ABE8c-m | TadA*8c | Monomer_TadA*7.10 + R26C + A109S + T111R + D119N + |
| | | H122N + F149Y + T166I + D167N |
| ABE8d-m | TadA*8d | Monomer_TadA*7.10 + V88A + T111R + D119N + F149Y |
| ABE8e-m | TadA*8e | Monomer_TadA*7.10 + A109S + T111R + D119N + H122N + |
| | | Y147D + F149Y + T166I + D167N |
| ABE8a-d | TadA*8a | Heterodimer_(WT) + (TadA*7.10 + R26C + A109S + T111R + |
| | | D119N + H122N + Y147D + F149Y + T166I + D167N) |
| ABE8b-d | TadA*8b | Heterodimer_(WT) + (TadA*7.10 + V88A + A109S + T111R + |
| | | D119N + H122N + F149Y + T166I + D167N) |
| ABE8c-d | TadA*8c | Heterodimer_(WT) + (TadA*7.10 + R26C + A109S + T111R + |
| | | D119N + H122N + F149Y + T166I + D167N) |
| ABE8d-d | TadA*8d | Heterodimer_(WT) + (TadA*7.10 + V88A + T111R + D119N + |
| | | F149Y) |
| ABE8e-d | TadA*8e | Heterodimer_(WT) + (TadA*7.10 + A109S + T111R + |
| | | D119N + H122N + Y147D + F149Y + T166I + D167N) |

[0748] In some embodiments, base editors (e.g., ABE8) are generated by cloning an adenosine deaminase variant (e.g., TadA*8) into a scaffold that includes a circular permutant Cas9 (e.g., CP5 or CP6) and a bipartite nuclear localization sequence. In some embodiments, the base editor (e.g., ABE7.9, ABET.10, or ABE8) is an NGC PAM CP5 variant (S. pyogenes Cas9 or spVRQR Cas9). In some embodiments, the base editor (e.g., ABE7.9, ABE7.10, or ABE8) is an AGA PAM CP5 variant (S. pyogenes Cas9 or spVRQR Cas9). In some embodiments, the base editor (e.g., ABE7.9, ABE7.10, or ABE8) is an NGC PAM CP6 variant (S. pyogenes Cas9 or spVRQR Cas9). In some embodiments, the base editor (e.g. ABE7.9, ABE7.10, or ABE8) is an AGA PAM CP6 variant (S. pyogenes Cas9 or spVRQR Cas9).

[0749] In some embodiments, the ABE has a genotype as shown in Table 14 below.

TABLE 14
Genotypes of ABEs

| | 23 | 26 | 36 | 37 | 48 | 49 | 51 | 72 | 84 | 87 | 105 | 108 | 123 | 125 | 142 | 145 | 147 | 152 | 155 | 156 | 157 | 161 |
|---|---|---|---|---|---|---|---|---|---|---|---|---|---|---|---|---|---|---|---|---|---|---|
| ABE7.9 | L | R | L | N | A | | L | N | F | S | V | N | Y | G | N | C | Y | P | V | F | N | K |
| ABE7.10 | R | R | L | N | A | | L | N | F | S | V | N | Y | G | A | C | Y | P | V | F | N | K |

[0750] As shown in Table 15 below, genotypes of 40 ABE8s are described. Residue positions in the evolved E. coli TadA portion of ABE are indicated. Mutational changes in ABE8 are shown when distinct from ABE7.10 mutations. In some embodiments, the ABE has a genotype of one of the ABEs as shown in Table 15 below.

TABLE 15
Residue Identity in Evolved TadA

| | 23 | 36 | 48 | 51 | 76 | 82 | 84 | 106 | 108 | 123 | 146 | 147 | 152 | 154 | 155 | 156 | 157 | 166 |
|---|---|---|---|---|---|---|---|---|---|---|---|---|---|---|---|---|---|---|
| ABE7.10 | R | L | A | L | I | V | F | V | N | Y | C | Y | P | Q | V | F | N | T |
| ABE8.1-m | | | | | | | | | | | | T | | | | | | |
| ABE8.2-m | | | | | | | | | | | | R | | | | | | |
| ABE8.3-m | | | | | | | | | | | | | | S | | | | |
| ABE8.4-m | | | | | | | | | | H | | | | | | | | |
| ABE8.5-m | | | | | | S | | | | | | | | | | | | |
| ABE8.6-m | | | | | | | | | | | | | | | | | | R |
| ABE8.7-m | | | | | | | | | | | | | | R | | | | |
| ABE8.8-m | | | | | | | | | | H | | R | | R | | | | |
| ABE8.9-m | | | | | Y | | | | | | | R | | R | | | | |
| ABE8.10-m | | | | | | | | | | | | R | | R | | | | R |
| ABE8.11-m | | | | | | | | | | | | T | | R | | | | |
| ABE8.12-m | | | | | | | | | | | | T | | S | | | | |
| ABE8.13-m | | | | | Y | | | | | H | | R | | R | | | | |
| ABE8.14-m | | | | | Y | S | | | | | | | | | | | | |
| ABE8.15-m | | | | | | S | | | | | | R | | | | | | |
| ABE8.16-m | | | | | | S | | | | H | | R | | | | | | |
| ABE8.17-m | | | | | | S | | | | | | | | R | | | | |
| ABE8.18-m | | | | | | S | | | | H | | | | R | | | | |
| ABE8.19-m | | | | | | S | | | | H | | R | | R | | | | |
| ABE8.20-m | | | | | Y | S | | | | H | | R | | R | | | | |
| ABE8.21-m | | | | | | | | | | | | R | | S | | | | |
| ABE8.22-m | | | | | | S | | | | | | | | S | | | | |
| ABE8.23-m | | | | | | S | | | | H | | | | | | | | |
| ABE8.24-m | | | | | | S | | | | H | | T | | | | | | |
| ABE8.1-d | | | | | | | | | | | | T | | | | | | |
| ABE8.2-d | | | | | | | | | | | | R | | | | | | |
| ABE8.3-d | | | | | | | | | | | | | | S | | | | |
| ABE8.4-d | | | | | | | | | | H | | | | | | | | |
| ABE8.5-d | | | | | | S | | | | | | | | | | | | |
| ABE8.6-d | | | | | | | | | | | | | | | | | | R |
| ABE8.7-d | | | | | | | | | | | | | | R | | | | |
| ABE8.8-d | | | | | | | | | | H | | R | | R | | | | |
| ABE8.9-d | | | | | Y | | | | | | | R | | R | | | | |
| ABE8.10-d | | | | | | | | | | | | R | | R | | | | R |
| ABE8.11-d | | | | | | | | | | | | T | | R | | | | |
| ABE8.12-d | | | | | | | | | | | | T | | S | | | | |
| ABE8.13-d | | | | | Y | | | | | H | | R | | R | | | | |
| ABE8.14-d | | | | | Y | S | | | | | | | | | | | | |
| ABE8.15-d | | | | | | S | | | | | | R | | | | | | |
| ABE8.16-d | | | | | | S | | | | H | | R | | | | | | |
| ABE8.17-d | | | | | | S | | | | | | | | R | | | | |
| ABE8.18-d | | | | | | S | | | | H | | | | R | | | | |
| ABE8.19-d | | | | | | S | | | | H | | R | | R | | | | |
| ABE8.20-d | | | | | Y | S | | | | H | | R | | R | | | | |
| ABE8.21-d | | | | | | | | | | | | R | | S | | | | |
| ABE8.22-d | | | | | | S | | | | | | | | S | | | | |
| ABE8.23-d | | | | | | S | | | | H | | | | | | | | |
| ABE8.24-d | | | | | | S | | | | H | | T | | | | | | |

[0751] In some embodiments, the base editor is ABE8.1, which comprises or consists essentially of the following sequence or a fragment thereof having adenosine deaminase activity:

>ABE8.1_Y147T_CP5_NGC PAM_monomer
(SEQ ID NO: 331)
MSEVEFSHEYWMRHALTLAKRARDEREVPVGAVLVLNNRVIGEGWNRAIGLHDPTAHAEIMALR
QGGLVMQNYRLIDATLYVTFEPCVMCAGAMIHSRIGRVVFGVRNAKTGAAGSLMDVLHYPGMNH
RVEITEGILADECAALLCTFFRMPRQVFNAQKKAQSSTDSGGSSGGSSGSETPGTSESATPESS
GGSSGGSEIGKATAKYFFYSNIMNFFKTEITLANGEIRKRPLIETNGETGEIVWDKGRDFATVR
KVLSMPQVNIVKKTEVQTGGFSKESILPKRNSDKLIARKKDWDPKKYGGFMQPTVAYSVLVVAK
VEKGKSKKLKSVKELLGITIMERSSFEKNPIDFLEAKGYKEVKKDLIIKLPKYSLFELENGRKR
MLASAKFLQKGNELALPSKYVNFLYLASHYEKLKGSPEDNEQKQLFVEQHKHYLDEIIEQISEF
SKRVILADANLDKVLSAYNKHRDKPIREQAENIIHLFTLTNLGAPRAFKYFDTTIARKEYRSTK
EVLDATLIHQSITGLYETRIDLSQLGGDGGSGGSGGSGGSGGSGGSGGMDKKYSIGLAIGTNSV
GWAVITDEYKVPSKKFKVLGNTDRHSIKKNLIGALLFDSGETAEATRLKRTARRRYTRRKNRIC
YLQEIFSNEMAKVDDSFFHRLEESFLVEEDKKHERHPIFGNIVDEVAYHEKYPTIYHLRKKLVD
STDKADLRLIYLALAHMIKFRGHFLIEGDLNPDNSDVDKLFIQLVQTYNQLFEENPINASGVDA
KAILSARLSKSRRLENLIAQLPGEKKNGLFGNLIALSLGLTPNFKSNFDLAEDAKLQLSKDTYD
DDLDNLLAQIGDQYADLFLAAKNLSDAILLSDILRVNTEITKAPLSASMIKRYDEHHQDLTLLK
ALVRQQLPEKYKEIFFDQSKNGYAGYIDGGASQEEFYKFIKPILEKMDGTEELLVKLNREDLLR
KQRTFDNGSIPHQIHLGELHAILRRQEDFYPFLKDNREKIEKILTFRIPYYVGPLARGNSRFAW
MTRKSEETITPWNFEEVVDKGASAQSFIERMTNFDKNLPNEKVLPKHSLLYEYFTVYNELTKVK
YVTEGMRKPAFLSGEQKKAIVDLLFKTNRKVTVKQLKEDYFKKIECFDSVEISGVEDRFNASLG
TYHDLLKIIKDKDFLDNEENEDILEDIVLTLTLFEDREMIEERLKTYAHLFDDKVMKQLKRRRY
TGWGRLSRKLINGIRDKQSGKTILDFLKSDGFANRNFMQLIHDDSLTFKEDIQKAQVSGQGDSL
HEHIANLAGSPAIKKGILQTVKVVDELVKVMGRHKPENIVIEMARENQTTQKGQKNSRERMKRI
EEGIKELGSQILKEHPVENTQLQNEKLYLYYLQNGRDMYVDQELDINRLSDYDVDHIVPQSFLK
DDSIDNKVLTRSDKNRGKSDNVPSEEVVKKMKNYWRQLLNAKLITQRKFDNLTKAERGGLSELD
KAGFIKRQLVETRQITKHVAQILDSRMNTKYDENDKLIREVKVITLKSKLVSDFRKDFQFYKVR
EINNYHHAHDAYLNAVVGTALIKKYPKLESEFVYGDYKVYDVRKMIAKSEQEGADKRTADGSEF
ESPKKKRKV

[0752] In the above sequence, the plain text denotes an adenosine deaminase sequence, bold sequence indicates sequence derived from Cas9, the italicized sequence denotes a linker sequence, and the underlined sequence denotes a bipartite nuclear localization sequence. Other ABE8 sequences are provided in the attached sequence listing (SEQ ID NOs: 332-354).

[0753] In some embodiments, the base editor is a ninth generation ABE (ABE9). In some embodiments, the ABE9 contains a TadA*9 variant. ABE9 base editors include an adenosine deaminase variant comprising an amino acid sequence, which contains alterations relative to an ABE7*10 reference sequence, as described herein. Exemplary ABE9 variants are listed in Table 16. Details of ABE9 base editors are described in International PCT Application No. PCT/US2020/049975, which is incorporated herein by reference for its entirety.

TABLE 16
Adenosine Base Editor 9 (ABE9) Variants. In the table, “monomer”
indicates an ABE comprising a single TadA*7.10 comprising
the indicated alterations and “heterodimer” indicates
an ABE comprising a TadA*7.10 comprising the indicated alterations
fused to an E. coli TadA adenosine deaminase.

| ABE9 Description | Alterations |
|---|---|
| ABE9.1_monomer | E25F, V82S, Y123H, T133K, Y147R, Q154R |
| ABE9.2_monomer | E25F, V82S, Y123H, Y147R, Q154R |
| ABE9.3_monomer | V82S, Y123H, P124W, Y147R, Q154R |
| ABE9.4_monomer | L51W, V82S, Y123H, C146R, Y147R, Q154R |
| ABE9.5_monomer | P54C, V82S, Y123H, Y147R, Q154R |
| ABE9.6_monomer | Y73S, V82S, Y123H, Y147R, Q154R |
| ABE9.7_monomer | N38G, V82T, Y123H, Y147R, Q154R |
| ABE9.8_monomer | R23H, V82S, Y123H, Y147R, Q154R |
| ABE9.9_monomer | R21N, V82S, Y123H, Y147R, Q154R |
| ABE9.10_monomer | V82S, Y123H, Y147R, Q154R, A158K |
| ABE9.11_monomer | N72K, V82S, Y123H, D139L, Y147R, Q154R, |
| ABE9.12_monomer | E25F, V82S, Y123H, D139M, Y147R, Q154R |
| ABE9.13_monomer | M70V, V82S, M94V, Y123H, Y147R, Q154R |
| ABE9.14_monomer | Q71M, V82S, Y123H, Y147R, Q154R |
| ABE9.15_heterodimer | E25F, V82S, Y123H, T133K, Y147R, Q154R |
| ABE9.16_heterodimer | E25F, V82S, Y123H, Y147R, Q154R |
| ABE9.17_heterodimer | V82S, Y123H, P124W, Y147R, Q154R |
| ABE9.18_heterodimer | L51W, V82S, Y123H, C146R, Y147R, Q154R |
| ABE9.19_heterodimer | P54C, V82S, Y123H, Y147R, Q154R |
| ABE9.2_heterodimer | Y73S, V82S, Y123H, Y147R, Q154R |
| ABE9.21_heterodimer | N38G, V82T, Y123H, Y147R, Q154R |
| ABE9.22_heterodimer | R23H, V82S, Y123H, Y147R, Q154R |
| ABE9.23_heterodimer | R21N, V82S, Y123H, Y147R, Q154R |
| ABE9.24_heterodimer | V82S, Y123H, Y147R, Q154R, A158K |
| ABE9.25_heterodimer | N72K, V82S, Y123H, D139L, Y147R, Q154R, |
| ABE9.26_heterodimer | E25F, V82S, Y123H, D139M, Y147R, Q154R |
| ABE9.27_heterodimer | M70V, V82S, M94V, Y123H, Y147R, Q154R |
| ABE9.28_heterodimer | Q71M, V82S, Y123H, Y147R, Q154R |
| ABE9.29_monomer | E25F_I76Y_V82S_Y123H_Y147R_Q154R |
| ABE9.30_monomer | I76Y_V82T_Y123H_Y147R_Q154R |
| ABE9.31_monomer | N38G_I76Y_V82S_Y123H_Y147R_Q154R |
| ABE9.32_monomer | N38G_I76Y_V82T_Y123H_Y147R_Q154R |
| ABE9.33_monomer | R23H_I76Y_V82S_Y123H_Y147R_Q154R |
| ABE9.34_monomer | P54C_I76Y_V82S_Y123H_Y147R_Q154R |
| ABE9.35_monomer | R21N_I76Y_V82S_Y123H_Y147R_Q154R |
| ABE9.36_monomer | I76Y_V82S_Y123H_D138M_Y147R_Q154R |
| ABE9.37_monomer | Y72S_I76Y_V82S_Y123H_Y147R_Q154R |
| ABE9.38_heterodimer | E25F_I76Y_V82S_Y123H_Y147R_Q154R |
| ABE9.39_heterodimer | I76Y_V82T_Y123H_Y147R_Q154R |
| ABE9.40_heterodimer | N38G_I76Y_V82S_Y123H_Y147R_Q154R |
| ABE9.41_heterodimer | N38G_I76Y_V82T_Y123H_Y147R_Q154R |
| ABE9.42_heterodimer | R23H_I76Y_V82S_Y123H_Y147R_Q154R |
| ABE9.43_heterodimer | P54C_I76Y_V82S_Y123H_Y147R_Q154R |
| ABE9.44_heterodimer | R21N_I76Y_V82S_Y123H_Y147R_Q154R |
| ABE9.45_heterodimer | I76Y_V82S_Y123H_D138M_Y147R_Q154R |
| ABE9.46_heterodimer | Y72S_I76Y_V82S_Y123H_Y147R_Q154R |
| ABE9.47_monomer | N72K_V82S, Y123H, Y147R, Q154R |
| ABE9.48_monomer | Q71M_V82S, Y123H, Y147R, Q154R |
| ABE9.49_monomer | M70V, V82S, M94V, Y123H, Y147R, Q154R |
| ABE9.50_monomer | V82S, Y123H, T133K, Y147R, Q154R |
| ABE9.51_monomer | V82S, Y123H, T133K, Y147R, Q154R, |
| | A158K |
| ABE9.52_monomer | M70V, Q71M, N72K, V82S, Y123H, Y147R, |
| | Q154R |
| ABE9.53_heterodimer | N72K_V82S, Y123H, Y147R, Q154R |
| ABE9.54_heterodimer | Q71M_V82S, Y123H, Y147R, Q154R |
| ABE9.55_heterodimer | M70V, V82S, M94V, Y123H, Y147R, Q154R |
| ABE9.56_heterodimer | V82S, Y123H, T133K, Y147R, Q154R |
| ABE9.57_heterodimer | V82S, Y123H, T133K, Y147R, Q154R, |
| | A158K |
| ABE9.58_heterodimer | M70V, Q71M, N72K, V82S, Y123H, Y147R, |
| | Q154R |

[0754] In some embodiments, the base editor includes an adenosine deaminase variant comprising an amino acid sequence, which contains alterations relative to an ABE 7*10 reference sequence, as described herein. The term “monomer” as used in Table 16.1 refers to a monomeric form of TadA*7.10 comprising the alterations described. The term “heterodimer” as used in Table 16.1 refers to the specified wild-type E. coli TadA adenosine deaminase fused to a TadA*7.10 comprising the alterations as described.

TABLE 16.1
Adenosine Deaminase Base Editor Variants

| | Adenosine | |
|---|---|---|
| ABE | Deaminase | Adenosine Deaminase Description |
| ABE-605m | MSP605 | monomer_TadA*7.10 + V82G + Y147T + Q154S |
| ABE-680m | MSP680 | monomer_TadA*7.10 + I76Y + V82G + Y147T + Q154S |
| ABE-823m | MSP823 | monomer_TadA*7.10 + L36H + V82G + Y147T + Q154S + |
| | | N157K |
| ABE-824m | MSP824 | monomer_TadA*7.10 + V82G + Y147D + F149Y + Q154S + |
| | | D167N |
| ABE-825m | MSP825 | monomer_TadA*7.10 + L36H + V82G + Y147D + F149Y + |
| | | Q154S + N157K + D167N |
| ABE-827m | MSP827 | monomer_TadA*7.10 + L36H + I76Y + V82G + Y147T + |
| | | Q154S + N157K |
| ABE-828m | MSP828 | monomer_TadA*7.10 + I76Y + V82G + Y147D + F149Y + |
| | | Q154S + D167N |
| ABE-829m | MSP829 | monomer_TadA*7.10 + L36H + I76Y + V82G + Y147D + |
| | | F149Y + Q154S + N157K + D167N |
| ABE-605d | MSP605 | heterodimer_(WT) + (TadA*7.10 + V82G + Y147T + Q154S) |
| ABE-680d | MSP680 | heterodimer_(WT) + (TadA*7.10 + I76Y + V82G + Y147T + |
| | | Q154S) |
| ABE-823d | MSP823 | heterodimer_(WT) + (TadA*7.10 + L36H + V82G + Y147T + |
| | | Q154S + N157K) |
| ABE-824d | MSP824 | heterodimer_(WT) + (TadA*7.10 + V82G + Y147D + F149Y + |
| | | Q154S + D167N) |
| ABE-825d | MSP825 | heterodimer_(WT) + (TadA*7.10 + L36H + V82G + Y147D + |
| | | F149Y + Q154S + N157K + D167N) |
| ABE-827d | MSP827 | heterodimer_(WT) + (TadA*7.10 + L36H + I76Y + V82G + |
| | | Y147T + Q154S + N157K) |
| ABE-828d | MSP828 | heterodimer_(WT) + (TadA*7.10 + I76Y + V82G + Y147D + |
| | | F149Y + Q154S + D167N) |
| ABE-829d | MSP829 | heterodimer_(WT) + (TadA*7.10 + L36H + I76Y + V82G + |
| | | Y147D + F149Y + Q154S + N157K + D167N) |

[0755] In some embodiments, the base editor comprises a domain comprising all or a portion (e.g., a functional portion) of a uracil glycosylase inhibitor (UGI) or a uracil stabilizing protein (USP) domain. In some embodiments, the base editor comprises a domain comprising all or a portion (e.g., a functional portion) of a nucleic acid polymerase. In some embodiments, a base editor comprises as a domain all or a portion (e.g., a functional portion) of a nucleic acid polymerase (NAP). For example, a base editor can comprise all or a portion (e.g., a functional portion) of a eukaryotic NAP. In some embodiments, a NAP or portion thereof incorporated into a base editor is a DNA polymerase. In some embodiments, a NAP or portion thereof incorporated into a base editor has translesion polymerase activity. In some embodiments, a NAP or portion thereof incorporated into a base editor is a translesion DNA polymerase. In some embodiments, a NAP or portion thereof incorporated into a base editor is a Rev7, Rev1 complex, polymerase iota, polymerase kappa, or polymerase eta. In some embodiments, a NAP or portion thereof incorporated into a base editor is a eukaryotic polymerase alpha, beta, gamma, delta, epsilon, gamma, eta, iota, kappa, lambda, mu, or nu component. In some embodiments, a NAP or portion thereof incorporated into a base editor comprises an amino acid sequence that is at least 75%, 80%, 85%, 90%, 95%, 96%, 97%, 98%, 99%, or 99.5% identical to a nucleic acid polymerase (e.g., a translesion DNA polymerase). In some embodiments, a nucleic acid polymerase or portion thereof incorporated into a base editor is a translesion DNA polymerase.

[0756] In some embodiments, a domain of the base editor comprises multiple domains. For example, the base editor comprising a polynucleotide programmable nucleotide binding domain derived from Cas9 can comprise a REC lobe and an NUC lobe corresponding to the REC lobe and NUC lobe of a wild-type or natural Cas9. In another example, the base editor can comprise one or more of a RuvCI domain, BH domain, REC1 domain, REC2 domain, RuvCII domain, L1 domain, HNH domain, L2 domain, RuvCIII domain, WED domain, TOPO domain or CTD domain. In some embodiments, one or more domains of the base editor comprise a mutation (e.g., substitution, insertion, deletion) relative to a wild-type version of a polypeptide comprising the domain. For example, an HNH domain of a polynucleotide programmable DNA binding domain can comprise an H840A substitution. In another example, a RuvCI domain of a polynucleotide programmable DNA binding domain can comprise a D10A substitution.

[0757] Different domains (e.g., adjacent domains) of the base editor disclosed herein can be connected to each other with or without the use of one or more linker domains (e.g., an XTEN linker domain). In some embodiments, a linker domain can be a bond (e.g., covalent bond), chemical group, or a molecule linking two molecules or moieties, e.g., two domains of a fusion protein, such as, for example, a first domain (e.g., Cas9-derived domain) and a second domain (e.g., an adenosine deaminase domain or a cytidine deaminase domain). In some embodiments, a linker is a covalent bond (e.g., a carbon-carbon bond, disulfide bond, carbon-hetero atom bond, etc.). In certain embodiments, a linker is a carbon nitrogen bond of an amide linkage. In certain embodiments, a linker is a cyclic or acyclic, substituted or unsubstituted, branched or unbranched aliphatic or heteroaliphatic linker. In certain embodiments, a linker is polymeric (e.g., polyethylene, polyethylene glycol, polyamide, polyester, etc.). In certain embodiments, a linker comprises a monomer, dimer, or polymer of aminoalkanoic acid. In some embodiments, a linker comprises an aminoalkanoic acid (e.g., glycine, ethanoic acid, alanine, beta-alanine, 3-aminopropanoic acid, 4-aminobutanoic acid, 5-pentanoic acid, etc.). In some embodiments, a linker comprises a monomer, dimer, or polymer of aminohexanoic acid (Ahx). In certain embodiments, a linker is based on a carbocyclic moiety (e.g., cyclopentane, cyclohexane). In other embodiments, a linker comprises a polyethylene glycol moiety (PEG). In certain embodiments, a linker comprises an aryl or heteroaryl moiety. In certain embodiments, the linker is based on a phenyl ring. A linker can include functionalized moieties to facilitate attachment of a nucleophile (e.g., thiol, amino) from the peptide to the linker. Any electrophile can be used as part of the linker. Exemplary electrophiles include, but are not limited to, activated esters, activated amides, Michael acceptors, alkyl halides, aryl halides, acyl halides, and isothiocyanates. In some embodiments, a linker joins a gRNA binding domain of an RNA-programmable nuclease, including a Cas9 nuclease domain, and the catalytic domain of a nucleic acid editing protein. In some embodiments, a linker joins a dCas9 and a second domain (e.g., UGI, etc.).

### Linkers

[0758] In certain embodiments, linkers may be used to link any of the peptides or peptide domains of the invention. The linker may be as simple as a covalent bond, or it may be a polymeric linker many atoms in length. In certain embodiments, the linker is a polypeptide or based on amino acids. In other embodiments, the linker is not peptide-like. In certain embodiments, the linker is a covalent bond (e.g., a carbon-carbon bond, disulfide bond, carbon-heteroatom bond, etc.). In certain embodiments, the linker is a carbon-nitrogen bond of an amide linkage. In certain embodiments, the linker is a cyclic or acyclic, substituted or unsubstituted, branched or unbranched aliphatic or heteroaliphatic linker. In certain embodiments, the linker is polymeric (e.g., polyethylene, polyethylene glycol, polyamide, polyester, etc.). In certain embodiments, the linker comprises a monomer, dimer, or polymer of aminoalkanoic acid. In certain embodiments, the linker comprises an aminoalkanoic acid (e.g., glycine, ethanoic acid, alanine, beta-alanine, 3-aminopropanoic acid, 4-aminobutanoic acid, 5-pentanoic acid, etc.). In certain embodiments, the linker comprises a monomer, dimer, or polymer of aminohexanoic acid (Ahx). In certain embodiments, the linker is based on a carbocyclic moiety (e.g., cyclopentane, cyclohexane). In other embodiments, the linker comprises a polyethylene glycol moiety (PEG). In other embodiments, the linker comprises amino acids. In certain embodiments, the linker comprises a peptide. In certain embodiments, the linker comprises an aryl or heteroaryl moiety. In certain embodiments, the linker is based on a phenyl ring. The linker may include functionalized moieties to facilitate attachment of a nucleophile (e.g., thiol, amino) from the peptide to the linker. Any electrophile may be used as part of the linker. Exemplary electrophiles include, but are not limited to, activated esters, activated amides, Michael acceptors, alkyl halides, aryl halides, acyl halides, and isothiocyanates.

[0759] Typically, a linker is positioned between, or flanked by, two groups, molecules, or other moieties and connected to each one via a covalent bond, thus connecting the two. In some embodiments, a linker is an amino acid or a plurality of amino acids (e.g., a peptide or protein). In some embodiments, a linker is an organic molecule, group, polymer, or chemical moiety. In some embodiments, a linker is 2-100 amino acids in length, for example, 2, 3, 4, 5, 6, 7, 8, 9, 10, 11, 12, 13, 14, 15, 16, 17, 18, 19, 20, 21, 22, 23, 24, 25, 26, 27, 28, 29, 30, 30-35, 35-40, 40-45, 45-50, 50-60, 60-70, 70-80, 80-90, 90-100, 100-150, or 150-200 amino acids in length. In some embodiments, the linker is about 3 to about 104 (e.g., 5, 6, 7, 8, 9, 10, 11, 12, 13, 14, 15, 16, 17, 18, 19, 20, 21, 22, 23, 24, 25, 26, 27, 28, 29, 30, 31, 32, 33, 34, 35, 36, 37, 38, 39, 40, 41, 42, 43, 44, 45, 46, 47, 48, 49, 50, 55, 60, 65, 70, 75, 80, 85, 90, 95, or 100) amino acids in length. Longer or shorter linkers are also contemplated.

[0760] In some embodiments, any of the fusion proteins provided herein, comprise a cytidine or adenosine deaminase and a Cas9 domain that are fused to each other via a linker. Various linker lengths and flexibilities between the cytidine or adenosine deaminase and the Cas9 domain can be employed (e.g., ranging from very flexible linkers of the form (GGGS) n (SEQ ID NO: 246), (GGGGS)n (SEQ ID NO: 247), and (G)n to more rigid linkers of the form (EAAAK)n (SEQ ID NO: 248), (SGGS)n (SEQ ID NO: 355), SGSETPGTSESATPES (SEQ ID NO: 249) (see, e.g., Guilinger J P, et al. Fusion of catalytically inactive Cas9 to FokI nuclease improves the specificity of genome modification. Nat. Biotechnol. 2014; 32(6): 577-82; the entire contents are incorporated herein by reference) and (XP)n) in order to achieve the optimal length for activity for the cytidine or adenosine deaminase nucleobase editor. In some embodiments, n is 1, 2, 3, 4, 5, 6, 7, 8, 9, 10, 11, 12, 13, 14, or 15. In some embodiments, the linker comprises a (GGS)n motif, wherein n is 1, 3, or 7. In some embodiments, cytidine deaminase or adenosine deaminase and the Cas9 domain of any of the fusion proteins provided herein are fused via a linker comprising the amino acid sequence SGSETPGTSESATPES (SEQ ID NO: 249), which can also be referred to as the XTEN linker.

[0761] In some embodiments, the domains of the base editor are fused via a linker that comprises the amino acid sequence of:

(SEQ ID NO: 356)
SGGSSGSETPGTSESATPESSGGS,
(SEQ ID NO: 357)
SGGSSGGSSGSETPGTSESATPESSGGSSGGS,
or
(SEQ ID NO: 358)
GGSGGSPGSPAGSPTSTEEGTSESATPESGPGTSTEPSEGSAPGSPAGS
PTSTEEGTSTEPSEGSAPGTSTEPSEGSAPGTSESATPESGPGSEPATS
GGSGGS.

[0762] In some embodiments, domains of the base editor are fused via a linker comprising the amino acid sequence SGSETPGTSESATPES (SEQ ID NO: 249), which may also be referred to as the XTEN linker. In some embodiments, a linker comprises the amino acid sequence SGGS. In some embodiments, the linker is 24 amino acids in length. In some embodiments, the linker comprises the amino acid sequence SGGSSGGSSGSETPGTSESATPES (SEQ ID NO: 359). In some embodiments, the linker is 40 amino acids in length. In some embodiments, the linker comprises the amino acid sequence: SGGSSGGSSGSETPGTSESATPESSGGSSGGSSGGSSGGS (SEQ ID NO: 360). In some embodiments, the linker is 64 amino acids in length. In some embodiments, the linker comprises the amino acid sequence: SGGSSGGSSGSETPGTSESATPESSGGSSGGSSGGSSGGSSGSETPGTSESATPESSGGSSGGS (SEQ ID NO: 361). In some embodiments, the linker is 92 amino acids in length. In some embodiments, the linker comprises the amino acid sequence:

(SEQ ID NO: 362)
PGSPAGSPTSTEEGTSESATPESGPGTSTEPSEGSAPGSPAGSPTSTEE
GTSTEPSEGSAPGTSTEPSEGSAPGTSESATPESGPGSEPATS.

[0763] In some embodiments, a linker comprises a plurality of proline residues and is 5-21, 5-14, 5-9, 5-7 amino acids in length, e.g., PAPAP (SEQ ID NO: 363), PAPAPA (SEQ ID NO: 364), PAPAPAP (SEQ ID NO: 365), PAPAPAPA (SEQ ID NO: 366), P(AP)4 (SEQ ID NO: 367), P(AP)7 (SEQ ID NO: 368), P(AP)10 (SEQ ID NO: 369) (see, e.g., Tan J, Zhang F, Karcher D, Bock R. Engineering of high-precision base editors for site-specific single nucleotide replacement. Nat Commun. 2019 Jan. 25; 10(1):439; the entire contents are incorporated herein by reference). Such proline-rich linkers are also termed “rigid” linkers.

[0764] In another embodiment, the base editor system comprises a component (protein) that interacts non-covalently with a deaminase (DNA deaminase), e.g., an adenosine or a cytidine deaminase, and transiently attracts the adenosine or cytidine deaminase to the target nucleobase in a target polynucleotide sequence for specific editing, with minimal or reduced bystander or target-adjacent effects. Such a non-covalent system and method involving deaminase-interacting proteins serves to attract a DNA deaminase to a particular genomic target nucleobase and decouples the events of on-target and target-adjacent editing, thus enhancing the achievement of more precise single base substitution mutations. In an embodiment, the deaminase-interacting protein binds to the deaminase (e.g., adenosine deaminase or cytidine deaminase) without blocking or interfering with the active (catalytic) site of the deaminase from engaging the target nucleobase (e.g., adenosine or cytidine, respectively). Such as system, termed “MagnEdit,” involves interacting proteins tethered to a Cas9 and gRNA complex and can attract a co-expressed adenosine or cytidine deaminase (either exogenous or endogenous) to edit a specific genomic target site, and is described in McCann, J. et al., 2020, “MagnEdit-interacting factors that recruit DNA-editing enzymes to single base targets,” Life-Science-Alliance, Vol. 3, No. 4 (e201900606), (doi 10.26508/Isa.201900606), the contents of which are incorporated by reference herein in their entirety. In an embodiment, the DNA deaminase is an adenosine deaminase variant (e.g., TadA*8) as described herein.

[0765] In another embodiment, a system called “Suntag,” involves non-covalently interacting components used for recruiting protein (e.g., adenosine deaminase or cytidine deaminase) components, or multiple copies thereof, of base editors to polynucleotide target sites to achieve base editing at the site with reduced adjacent target editing, for example, as described in Tanenbaum, M. E. et al., “A protein tagging system for signal amplification in gene expression and fluorescence imaging,” Cell. 2014 October 23; 159(3): 635-646. doi:10.1016/j.cell.2014.09.039; and in Huang, Y.-H. et al., 2017, “DNA epigenome editing using CRISPR-Cas SunTag-directed DNMT3A,” Genome Biol 18: 176. doi:10.1186/s13059-017-1306-z, the contents of each of which are incorporated by reference herein in their entirety. In an embodiment, the DNA deaminase is an adenosine deaminase variant (e.g., TadA*8) as described herein.

Nucleic Acid Programmable DNA Binding Proteins with Guide RNAs

[0766] Provided herein are compositions and methods for base editing in cells. Further provided herein are compositions comprising a guide polynucleic acid sequence, e.g. a guide RNA sequence, or a combination of 2, 3, 4, 5, 6, 7, 8, 9, 10, 11, 12, 13, 14, 15, 16, 17, 18, 19, 20, or more guide RNAs as provided herein. In some embodiments, a composition for base editing as provided herein further comprises a polynucleotide that encodes a base editor, e.g. a C-base editor or an A-base editor. For example, a composition for base editing may comprise a mRNA sequence encoding a BE, a BE4, an ABE, and a combination of one or more guide RNAs as provided. A composition for base editing may comprise a base editor polypeptide and a combination of one or more of any guide RNAs provided herein. Such a composition may be used to effect base editing in a cell through different delivery approaches, for example, electroporation, nucleofection, viral transduction or transfection. In some embodiments, the composition for base editing comprises an mRNA sequence that encodes a base editor and a combination of one or more guide RNA sequences provided herein for electroporation.

[0767] Some aspects of this disclosure provide systems comprising any of the fusion proteins or complexes provided herein, and a guide RNA bound to a nucleic acid programmable DNA binding protein (napDNAbp) domain (e.g., a Cas9 (e.g., a dCas9, a nuclease active Cas9, or a Cas9 nickase) or Cas12) of the fusion protein or complex. These complexes are also termed ribonucleoproteins (RNPs). In some embodiments, the guide nucleic acid (e.g., guide RNA) is from 15-100 nucleotides long and comprises a sequence of at least 10 contiguous nucleotides that is complementary to a target sequence. In some embodiments, the guide RNA is 15, 16, 17, 18, 19, 20, 21, 22, 23, 24, 25, 26, 27, 28, 29, 30, 31, 32, 33, 34, 35, 36, 37, 38, 39, 40, 41, 42, 43, 44, 45, 46, 47, 48, 49, or 50 nucleotides long. In some embodiments, the guide RNA comprises a sequence of 15, 16, 17, 18, 19, 20, 21, 22, 23, 24, 25, 26, 27, 28, 29, 30, 31, 32, 33, 34, 35, 36, 37, 38, 39, or 40 contiguous nucleotides that is complementary to a target sequence. In some embodiments, the target sequence is a DNA sequence. In some embodiments, the target sequence is an RNA sequence. In some embodiments, the target sequence is a sequence in the genome of a bacteria, yeast, fungi, insect, plant, or animal. In some embodiments, the target sequence is a sequence in the genome of a human. In some embodiments, the 3′ end of the target sequence is immediately adjacent to a canonical PAM sequence (NGG). In some embodiments, the 3′ end of the target sequence is immediately adjacent to a non-canonical PAM sequence (e.g., a sequence listed in Table 7 or 5′-NAA-3′). In some embodiments, the guide nucleic acid (e.g., guide RNA) is complementary to a sequence in a gene of interest (e.g., a gene associated with a disease or disorder).

[0768] Some aspects of this disclosure provide methods of using the fusion proteins, or complexes provided herein. For example, some aspects of this disclosure provide methods comprising contacting a DNA molecule with any of the fusion proteins or complexes provided herein, and with at least one guide RNA, wherein the guide RNA is about 15-100 nucleotides long and comprises a sequence of at least 10 contiguous nucleotides that is complementary to a target sequence. In some embodiments, the 3′ end of the target sequence is immediately adjacent to an AGC, GAG, TTT, GTG, or CAA sequence. In some embodiments, the 3′ end of the target sequence is immediately adjacent to an NGA, NGCG, NGN, NNGRRT, NNNRRT, NGCG, NGCN, NGTN, NGTN, NGTN, or 5′ (TTTV) sequence. In some embodiments, the 3′ end of the target sequence is immediately adjacent to an e.g., TTN, DTTN, GTTN, ATTN, ATTC, DTTNT, WTTN, HATY, TTTN, TTTV, TTTC, TG, RTR, or YTN PAM site.

[0769] It will be understood that the numbering of the specific positions or residues in the respective sequences depends on the particular protein and numbering scheme used. Numbering might differ, e.g., in precursors of a mature protein and the mature protein itself, and differences in sequences from species to species may affect numbering. One of skill in the art will be able to identify the respective residue in any homologous protein and in the respective encoding nucleic acid by methods well known in the art, e.g., by sequence alignment and determination of homologous residues.

[0770] It will be apparent to those of skill in the art that in order to target any of the fusion proteins or complexes disclosed herein, to a target site, e.g., a site comprising a mutation to be edited, it is typically necessary to co-express the fusion protein or complex together with a guide RNA. As explained in more detail elsewhere herein, a guide RNA typically comprises a tracrRNA framework allowing for napDNAbp (e.g., Cas9 or Cas12) binding, and a guide sequence, which confers sequence specificity to the napDNAbp:nucleic acid editing enzyme/domain fusion protein or complex. Alternatively, the guide RNA and tracrRNA may be provided separately, as two nucleic acid molecules. In some embodiments, the guide RNA comprises a structure, wherein the guide sequence comprises a sequence that is complementary to the target sequence. The guide sequence is typically 20 nucleotides long. The sequences of suitable guide RNAs for targeting napDNAbp:nucleic acid editing enzyme/domain fusion proteins or complexes to specific genomic target sites will be apparent to those of skill in the art based on the instant disclosure. Such suitable guide RNA sequences typically comprise guide sequences that are complementary to a nucleic sequence within 50 nucleotides upstream or downstream of the target nucleotide to be edited. Some exemplary guide RNA sequences suitable for targeting any of the provided fusion proteins or complexes to specific target sequences are provided herein.

[0771] Distinct portions of sgRNA are predicted to form various features that interact with Cas9 (e.g., SpyCas9) and/or the DNA target. Six conserved modules have been identified within native crRNA:tracrRNA duplexes and single guide RNAs (sgRNAs) that direct Cas9 endonuclease activity (see Briner et al., Guide RNA Functional Modules Direct Cas9 Activity and Orthogonality Mol Cell. 2014 Oct. 23; 56(2):333-339). The six modules include the spacer responsible for DNA targeting, the upper stem, bulge, lower stem formed by the CRISPR repeat:tracrRNA duplex, the nexus, and hairpins from the 3′ end of the tracrRNA. The upper and lower stems interact with Cas9 mainly through sequence-independent interactions with the phosphate backbone. In some embodiments, the upper stem is dispensable. In some embodiments, the conserved uracil nucleotide sequence at the base of the lower stem is dispensable. The bulge participates in specific side-chain interactions with the Rec domain of Cas9. The nucleobase of U44 interacts with the side chains of Tyr 325 and His 328, while G43 interacts with Tyr 329. The nexus forms the core of the sgRNA:Cas9 interactions and lies at the intersection between the sgRNA and both Cas9 and the target DNA. The nucleobases of A51 and A52 interact with the side chain of Phe 1105; U56 interacts with Arg 457 and Asn 459; the nucleobase of U59 inserts into a hydrophobic pocket defined by side chains of Arg 74, Asn 77, Pro 475, Leu 455, Phe 446, and Ile 448; C60 interacts with Leu 455, Ala 456, and Asn 459, and C61 interacts with the side chain of Arg 70, which in turn interacts with C15. In some embodiments, one or more of these mutations are made in the bulge and/or the nexus of a sgRNA for a Cas9 (e.g., spyCas9) to optimize sgRNA:Cas9 interactions.

[0772] Moreover, the tracrRNA nexus and hairpins are critical for Cas9 pairing and can be swapped to cross orthogonality barriers separating disparate Cas9 proteins, which is instrumental for further harnessing of orthogonal Cas9 proteins. In some embodiments, the nexus and hairpins are swapped to target orthogonal Cas9 proteins. In some embodiments, a sgRNA is dispensed of the upper stem, hairpin 1, and/or the sequence flexibility of the lower stem to design a guide RNA that is more compact and conformationally stable. In some embodiments, the modules are modified to optimize multiplex editing using a single Cas9 with various chimeric guides or by concurrently using orthogonal systems with different combinations of chimeric sgRNAs. Details regarding guide functional modules and methods thereof are described, for example, in Briner et al., Guide RNA Functional Modules Direct Cas9 Activity and Orthogonality Mol Cell. 2014 Oct. 23; 56(2):333-339, the contents of which is incorporated by reference herein in its entirety.

[0773] The domains of the base editor disclosed herein can be arranged in any order. Non-limiting examples of a base editor comprising a fusion protein comprising e.g., a polynucleotide-programmable nucleotide-binding domain (e.g., Cas9 or Cas12) and a deaminase domain (e.g., cytidine or adenosine deaminase) can be arranged as follows:
[0774] NH₂-[nucleobase editing domain]-Linker1-[nucleobase editing domain]-COOH;
[0775] NH₂-[deaminase]-Linker1-[nucleobase editing domain]-COOH;
[0776] NH₂-[deaminase]-Linker1-[nucleobase editing domain]-Linker2-[UGI]-COOH;
[0777] NH₂-[deaminase]-Linker1-[nucleobase editing domain]-COOH;
[0778] NH₂-[adenosine deaminase]-Linker1-[nucleobase editing domain]-COOH;
[0779] NH₂-[nucleobase editing domain]-[deaminase]-COOH;
[0780] NH₂-[deaminase]-[nucleobase editing domain]-[inosine BER inhibitor]-COOH;
[0781] NH₂-[deaminase]-[inosine BER inhibitor]-[nucleobase editing domain]-COOH;
[0782] NH₂-[inosine BER inhibitor]-[deaminase]-[nucleobase editing domain]-COOH;
[0783] NH₂-[nucleobase editing domain]-[deaminase]-[inosine BER inhibitor]-COOH;
[0784] NH₂-[nucleobase editing domain]-[inosine BER inhibitor]-[deaminase]-COOH;
[0785] NH₂-[inosine BER inhibitor]-[nucleobase editing domain]-[deaminase]-COOH;
[0786] NH₂-[nucleobase editing domain]-Linker1-[deaminase]-Linker2-[nucleobase editing domain]-COOH;
[0787] NH₂-[nucleobase editing domain]-Linker1-[deaminase]-[nucleobase editing domain]-COOH;
[0788] NH₂-[nucleobase editing domain]-[deaminase]-Linker2-[nucleobase editing domain]-COOH;
[0789] NH₂-[nucleobase editing domain]-[deaminase]-[nucleobase editing domain]-COOH;
[0790] NH₂-[nucleobase editing domain]-Linker1-[deaminase]-Linker2-[nucleobase editing domain]-[inosine BER inhibitor]-COOH;
[0791] NH₂-[nucleobase editing domain]-Linker1-[deaminase]-[nucleobase editing domain]-[inosine BER inhibitor]-COOH;
[0792] NH₂-[nucleobase editing domain]-[deaminase]-Linker2-[nucleobase editing domain]-[inosine BER inhibitor]-COOH;
[0793] NH₂-[nucleobase editing domain]-[deaminase]-[nucleobase editing domain]-[inosine BER inhibitor]-COOH;
[0794] NH₂-[inosine BER inhibitor]-[nucleobase editing domain]-Linker1-[deaminase]-Linker2-[nucleobase editing domain]-COOH;
[0795] NH₂-[inosine BER inhibitor]-[nucleobase editing domain]-Linker1-[deaminase]-[nucleobase editing domain]-COOH;
[0796] NH₂-[inosine BER inhibitor]-[nucleobase editing domain]-[deaminase]-Linker2-[nucleobase editing domain]-COOH; or
[0797] NH₂-[inosine BER inhibitor]NH₂-[nucleobase editing domain]-[deaminase]-[nucleobase editing domain]-COOH.

[0798] In some embodiments, the base editing fusion proteins or complexes provided herein need to be positioned at a precise location, for example, where a target base is placed within a defined region (e.g., a “deamination window”). In some embodiments, a target can be within a 4-base region. In some embodiments, such a defined target region can be approximately 15 bases upstream of the PAM. See Komor, A. C., et al., “Programmable editing of a target base in genomic DNA without double-stranded DNA cleavage” Nature 533, 420-424 (2016); Gaudelli, N. M., et al., “Programmable base editing of A•T to G•C in genomic DNA without DNA cleavage” Nature 551, 464-471 (2017); and Komor, A. C., et al., “Improved base excision repair inhibition and bacteriophage Mu Gam protein yields C:G-to-T:A base editors with higher efficiency and product purity” Science Advances 3:eaao4774 (2017), the entire contents of which are hereby incorporated by reference.

[0799] A defined target region can be a deamination window. A deamination window can be the defined region in which a base editor acts upon and deaminates a target nucleotide. In some embodiments, the deamination window is within a 2, 3, 4, 5, 6, 7, 8, 9, or 10 base regions. In some embodiments, the deamination window is 5, 6, 7, 8, 9, 10, 11, 12, 13, 14, 15, 16, 17, 18, 19, 20, 21, 22, 23, 24, or 25 bases upstream of the PAM.

[0800] The base editors of the present disclosure can comprise any domain, feature or amino acid sequence which facilitates the editing of a target polynucleotide sequence. For example, in some embodiments, the base editor comprises a nuclear localization sequence (NLS). In some embodiments, an NLS of the base editor is localized between a deaminase domain and a napDNAbp domain. In some embodiments, an NLS of the base editor is localized C-terminal to a napDNAbp domain.

[0801] Non-limiting examples of protein domains which can be included in the fusion protein or complex include a deaminase domain (e.g., adenosine deaminase or cytidine deaminase), a uracil glycosylase inhibitor (UGI) domain, epitope tags, reporter gene sequences, and/or protein domains having one or more of the activities described herein.

[0802] A domain may be detected or labeled with an epitope tag, a reporter protein, other binding domains. Non-limiting examples of epitope tags include histidine (His) tags, V5 tags, FLAG tags, influenza hemagglutinin (HA) tags, Myc tags, VSV-G tags, and thioredoxin (Trx) tags. Examples of reporter genes include, but are not limited to, glutathione-5-transferase (GST), horseradish peroxidase (HRP), chloramphenicol acetyltransferase (CAT) beta-galactosidase, beta-glucuronidase, luciferase, green fluorescent protein (GFP), HcRed, DsRed, cyan fluorescent protein (CFP), yellow fluorescent protein (YFP), and autofluorescent proteins including blue fluorescent protein (BFP). Additional protein sequences can include amino acid sequences that bind DNA molecules or bind other cellular molecules, including but not limited to maltose binding protein (MBP), S-tag, Lex A DNA binding domain (DBD) fusions, GAL4 DNA binding domain fusions, and herpes simplex virus (HSV) BP16 protein fusions.

### Methods of Using Fusion Proteins or Complexes Comprising a Cytidine or Adenosine Deaminase and a Cas9 Domain

[0803] Some aspects of this disclosure provide methods of using the fusion proteins, or complexes provided herein. For example, some aspects of this disclosure provide methods comprising contacting a DNA molecule with any of the fusion proteins or complexes provided herein, and with at least one guide RNA described herein.

[0804] In some embodiments, a fusion protein or complex of the invention is used for editing a target gene of interest. In particular, a cytidine deaminase or adenosine deaminase nucleobase editor described herein is capable of making multiple mutations within a target sequence. These mutations may affect the function of the target. For example, when a cytidine deaminase or adenosine deaminase nucleobase editor is used to target a regulatory region the function of the regulatory region is altered and the expression of the downstream protein is reduced or eliminated.

[0805] It will be understood that the numbering of the specific positions or residues in the respective sequences depends on the particular protein and numbering scheme used. Numbering might be different, e.g., in precursors of a mature protein and the mature protein itself, and differences in sequences from species to species may affect numbering. One of skill in the art will be able to identify the respective residue in any homologous protein and in the respective encoding nucleic acid by methods well known in the art, e.g., by sequence alignment and determination of homologous residues.

[0806] It will be apparent to those of skill in the art that in order to target any of the fusion proteins or complexes comprising a Cas9 domain and a cytidine or adenosine deaminase, as disclosed herein, to a target site, e.g., a site comprising a mutation to be edited, it is typically necessary to co-express the fusion protein or complex together with a guide RNA, e.g., an sgRNA. As explained in more detail elsewhere herein, a guide RNA typically comprises a tracrRNA framework allowing for Cas9 binding, and a guide sequence, which confers sequence specificity to the Cas9:nucleic acid editing enzyme/domain fusion protein or complex. Alternatively, the guide RNA and tracrRNA may be provided separately, as two nucleic acid molecules. In some embodiments, the guide RNA comprises a structure, wherein the guide sequence comprises a sequence that is complementary to the target sequence. The guide sequence is typically 20 nucleotides long. The sequences of suitable guide RNAs for targeting Cas9:nucleic acid editing enzyme/domain fusion proteins or complexes to specific genomic target sites will be apparent to those of skill in the art based on the instant disclosure. Such suitable guide RNA sequences typically comprise guide sequences that are complementary to a nucleic sequence within 50 nucleotides upstream or downstream of the target nucleotide to be edited. Some exemplary guide RNA sequences suitable for targeting any of the provided fusion proteins or complexes to specific target sequences are provided herein.

### Base Editor Efficiency

[0807] In some embodiments, the purpose of the methods provided herein is to alter a gene and/or gene product via gene editing. The nucleobase editing proteins provided herein can be used for gene editing-based human therapeutics in vitro or in vivo. It will be understood by the skilled artisan that the nucleobase editing proteins provided herein, e.g., the fusion proteins or complexes comprising a polynucleotide programmable nucleotide binding domain (e.g., Cas9) and a nucleobase editing domain (e.g., an adenosine deaminase domain or a cytidine deaminase domain) can be used to edit a nucleotide from A to G or C to T.

[0808] Advantageously, base editing systems as provided herein provide genome editing without generating double-strand DNA breaks, without requiring a donor DNA template, and without inducing an excess of stochastic insertions and deletions as CRISPR may do. In some embodiments, the present disclosure provides base editors that efficiently generate an intended mutation, such as a STOP codon, in a nucleic acid (e.g., a nucleic acid within a genome of a subject) without generating a significant number of unintended mutations, such as unintended point mutations. In some embodiments, an intended mutation is a mutation that is generated by a specific base editor (e.g., adenosine base editor or cytidine base editor) bound to a guide polynucleotide (e.g., gRNA), specifically designed to generate the intended mutation. In some embodiments, the intended mutation is in a gene associated with a target antigen associated with a disease or disorder, e.g., spinal muscular atrophy. In some embodiments, the intended mutation is an adenine (A) to guanine (G) point mutation (e.g., SNP) in a gene associated with a target antigen associated with a disease or disorder, e.g. spinal muscular atrophy. In some embodiments, the intended mutation is an adenine (A) to guanine (G) point mutation within the coding region or non-coding region of a gene (e.g., regulatory region or element). In some embodiments, the intended mutation is a cytosine (C) to thymine (T) point mutation (e.g., SNP) in a gene associated with a target antigen associated with a disease or disorder, e.g., spinal muscular atrophy. In some embodiments, the intended mutation is a cytosine (C) to thymine (T) point mutation within the coding region or non-coding region of a gene (e.g., regulatory region or element). In some embodiments, the intended mutation is a point mutation that generates a STOP codon, for example, a premature STOP codon within the coding region of a gene. In some embodiments, the intended mutation is a mutation that eliminates a stop codon.

[0809] The base editors of the invention advantageously modify a specific nucleotide base encoding a protein without generating a significant proportion of indels. An “indel”, as used herein, refers to the insertion or deletion of a nucleotide base within a nucleic acid. Such insertions or deletions can lead to frame shift mutations within a coding region of a gene. In some embodiments, it is desirable to generate base editors that efficiently modify (e.g. mutate) a specific nucleotide within a nucleic acid, without generating a large number of insertions or deletions (i.e., indels) in the nucleic acid. In some embodiments, it is desirable to generate base editors that efficiently modify (e.g. mutate or methylate) a specific nucleotide within a nucleic acid, without generating a large number of insertions or deletions (i.e., indels) in the nucleic acid. In certain embodiments, any of the base editors provided herein can generate a greater proportion of intended modifications (e.g., methylations) versus indels. In certain embodiments, any of the base editors provided herein can generate a greater proportion of intended modifications (e.g., mutations) versus indels.

[0810] In some embodiments, the base editors provided herein are capable of generating a ratio of intended mutations to indels (i.e., intended point mutations:unintended point mutations) that is greater than 1:1. In some embodiments, the base editors provided herein are capable of generating a ratio of intended mutations to indels that is at least 1.5:1, at least 2:1, at least 2.5:1, at least 3:1, at least 3.5:1, at least 4:1, at least 4.5:1, at least 5:1, at least 5.5:1, at least 6:1, at least 6.5:1, at least 7:1, at least 7.5:1, at least 8:1, at least 10:1, at least 12:1, at least 15:1, at least 20:1, at least 25:1, at least 30:1, at least 40:1, at least 50:1, at least 100:1, at least 200:1, at least 300:1, at least 400:1, at least 500:1, at least 600:1, at least 700:1, at least 800:1, at least 900:1, or at least 1000:1, or more. The number of intended mutations and indels may be determined using any suitable method.

[0811] In some embodiments, the base editors provided herein can limit formation of indels in a region of a nucleic acid. In some embodiments, the region is at a nucleotide targeted by a base editor or a region within 2, 3, 4, 5, 6, 7, 8, 9, or 10 nucleotides of a nucleotide targeted by a base editor. In some embodiments, any of the base editors provided herein can limit the formation of indels at a region of a nucleic acid to less than 1%, less than 1.5%, less than 2%, less than 2.5%, less than 3%, less than 3.5%, less than 4%, less than 4.5%, less than 5%, less than 6%, less than 7%, less than 8%, less than 9%, less than 10%, less than 12%, less than 15%, or less than 20%. The number of indels formed at a nucleic acid region may depend on the amount of time a nucleic acid (e.g., a nucleic acid within the genome of a cell) is exposed to a base editor. In some embodiments, a number or proportion of indels is determined after at least 1 hour, at least 2 hours, at least 6 hours, at least 12 hours, at least 24 hours, at least 36 hours, at least 48 hours, at least 3 days, at least 4 days, at least 5 days, at least 7 days, at least 10 days, or at least 14 days of exposing a nucleic acid (e.g., a nucleic acid within the genome of a cell) to a base editor.

[0812] Some aspects of the disclosure are based on the recognition that any of the base editors provided herein are capable of efficiently generating an intended mutation in a nucleic acid (e.g. a nucleic acid within a genome of a subject) without generating a considerable number of unintended mutations (e.g., spurious off-target editing or bystander editing). In some embodiments, an intended mutation is a mutation that is generated by a specific base editor bound to a gRNA, specifically designed to generate the intended mutation. In some embodiments, the intended mutation is a mutation that generates a stop codon, for example, a premature stop codon within the coding region of a gene. In some embodiments, the intended mutation is a mutation that eliminates a stop codon. In some embodiments, the intended mutation is a mutation that alters the splicing of a gene. In some embodiments, the intended mutation is a mutation that alters the regulatory sequence of a gene (e.g., a gene promotor or gene repressor). In some embodiments, any of the base editors provided herein are capable of generating a ratio of intended mutations to unintended mutations (e.g., intended mutations:unintended mutations) that is greater than 1:1. In some embodiments, any of the base editors provided herein are capable of generating a ratio of intended mutations to unintended mutations that is at least 1.5:1, at least 2:1, at least 2.5:1, at least 3:1, at least 3.5:1, at least 4:1, at least 4.5:1, at least 5:1, at least 5.5:1, at least 6:1, at least 6.5:1, at least 7:1, at least 7.5:1, at least 8:1, at least 10:1, at least 12:1, at least 15:1, at least 20:1, at least 25:1, at least 30:1, at least 40:1, at least 50:1, at least 100:1, at least 150:1, at least 200:1, at least 250:1, at least 500:1, or at least 1000:1, or more. It should be appreciated that the characteristics of the base editors described herein may be applied to any of the fusion proteins or complexes, or methods of using the fusion proteins or complexes provided herein.

[0813] Base editing is often referred to as a “modification”, such as, a genetic modification, a gene modification and modification of the nucleic acid sequence and is clearly understandable based on the context that the modification is a base editing modification. A base editing modification is therefore a modification at the nucleotide base level, for example as a result of the deaminase activity discussed throughout the disclosure, which then results in a change in the gene sequence, and may affect the gene product. In essence therefore, the gene editing modification described herein may result in a modification of the gene, structurally and/or functionally, wherein the expression of the gene product may be modified, for example, the expression of the gene is knocked out; or conversely, enhanced, or, in some circumstances, the gene function or activity may be modified. Using the methods disclosed herein, a base editing efficiency may be determined as the knockdown efficiency of the gene in which the base editing is performed, wherein the base editing is intended to knockdown the expression of the gene. A knockdown level may be validated quantitatively by determining the expression level by any detection assay, such as assay for protein expression level, for example, by flow cytometry; assay for detecting RNA expression such as quantitative RT-PCR, northern blot analysis, or any other suitable assay such as pyrosequencing; and may be validated qualitatively by nucleotide sequencing reactions.

[0814] In some embodiments, the modification, e.g., single base edit results in at least 10% increase of the gene targeted expression. In some embodiments, the base editing efficiency may result in at least 10% increase of the gene targeted expression. In some embodiments, the base editing efficiency may result in at least 20% increase of the gene targeted expression. In some embodiments, the base editing efficiency may result in at least 30% increase of the gene targeted expression. In some embodiments, the base editing efficiency may result in at least 40% increase of the gene targeted expression. In some embodiments, the base editing efficiency may result in at least 50% increase of the gene targeted expression. In some embodiments, the base editing efficiency may result in at least 60% increase of the targeted gene expression. In some embodiments, the base editing efficiency may result in at least 70% increase of the targeted gene expression. In some embodiments, the base editing efficiency may result in at least 80% increase of the targeted gene expression. In some embodiments, the base editing efficiency may result in at least 90% increase of the targeted gene expression. In some embodiments, the base editing efficiency may result in at least 91% increase of the targeted gene expression. In some embodiments, the base editing efficiency may result in at least 92% increase of the targeted gene expression. In some embodiments, the base editing efficiency may result in at least 93% increase of the targeted gene expression. In some embodiments, the base editing efficiency may result in at least 94% increase of the targeted gene expression. In some embodiments, the base editing efficiency may result in at least 95% increase of the targeted gene expression. In some embodiments, the base editing efficiency may result in at least 96% increase of the targeted gene expression. In some embodiments, the base editing efficiency may result in at least 97% increase of the targeted gene expression. In some embodiments, the base editing efficiency may result in at least 98% increase of the targeted gene expression. In some embodiments, the base editing efficiency may result in at least 99% increase of the targeted gene expression. In some embodiments, the base editing efficiency may result in a 1.1, 1.2, 1.3, 1.4, 1.5, 2, 3, 4, 5, 6, 7, 8, 9, 10, 20, 30, 40, 50, 60, 70, 80, 90, or 100-fold increase of the targeted gene expression.

[0815] In some embodiments, any of the base editor systems provided herein result in less than 50%, less than 40%, less than 30%, less than 20%, less than 19%, less than 18%, less than 17%, less than 16%, less than 15%, less than 14%, less than 13%, less than 12%, less than 11%, less than 10%, less than 9%, less than 8%, less than 7%, less than 6%, less than 5%, less than 4%, less than 3%, less than 2%, less than 1%, less than 0.9%, less than 0.8%, less than 0.7%, less than 0.6%, less than 0.5%, less than 0.4%, less than 0.3%, less than 0.2%, less than 0.1%, less than 0.09%, less than 0.08%, less than 0.07%, less than 0.06%, less than 0.05%, less than 0.04%, less than 0.03%, less than 0.02%, or less than 0.01% indel formation in the target polynucleotide sequence.

[0816] In some embodiments, targeted modifications, e.g., single base editing, are used simultaneously to target at least 4, 5, 6, 7, 8, 9, 10, 11, 12 13, 14, 15, 16, 17, 18, 19, 20, 21, 22, 23, 24, 25, 26, 27, 28, 29, 30, 31, 32, 33, 34, 35, 36, 37, 38, 39, 40, 41, 42, 43, 44, 45, 46, 47, 48, 49 or 50 different endogenous sequences for base editing with different guide RNAs. In some embodiments, targeted modifications, e.g. single base editing, are used to sequentially target at least 4, 5, 6, 7, 8, 9, 10, 11, 12 13, 14, 15, 16, 17, 18, 19, 20, 21, 22, 23, 24, 25, 26, 27, 28, 29, 30, 31, 32, 33, 34, 35, 36, 37, 38, 39, 40, 41, 42, 43, 44, 45, 46, 47, 48, 49 50, or more different endogenous gene sequences for base editing with different guide RNAs.

[0817] Some aspects of the disclosure are based on the recognition that any of the base editors provided herein are capable of efficiently generating an intended mutation, such as a point mutation, in a nucleic acid (e.g., a nucleic acid within a genome of a subject) without generating a significant number of unintended mutations, such as unintended point mutations (i.e., mutation of bystanders). In some embodiments, any of the base editors provided herein are capable of generating at least 0.01% of intended mutations (i.e., at least 0.01% base editing efficiency). In some embodiments, any of the base editors provided herein are capable of generating at least 0.01%, 1%, 2%, 3%, 4%, 5%, 10%, 15%, 20%, 25%, 30%, 40%, 45%, 50%, 60%, 70%, 80%, 90%, 95%, or 99% of intended mutations.

[0818] In some embodiments, any of the base editor systems comprising one of the ABE8 base editor variants described herein result in less than 50%, less than 40%, less than 30%, less than 20%, less than 19%, less than 18%, less than 17%, less than 16%, less than 15%, less than 14%, less than 13%, less than 12%, less than 11%, less than 10%, less than 9%, less than 8%, less than 7%, less than 6%, less than 5%, less than 4%, less than 3%, less than 2%, less than 1%, less than 0.9%, less than 0.8%, less than 0.7%, less than 0.6%, less than 0.5%, less than 0.4%, less than 0.3%, less than 0.2%, less than 0.1%, less than 0.09%, less than 0.08%, less than 0.07%, less than 0.06%, less than 0.05%, less than 0.04%, less than 0.03%, less than 0.02%, or less than 0.01% indel formation in the target polynucleotide sequence. In some embodiments, any of the base editor systems comprising one of the ABE8 base editor variants described herein result in less than 0.8% indel formation in the target polynucleotide sequence. In some embodiments, any of the base editor systems comprising one of the ABE8 base editor variants described herein result in at most 0.8% indel formation in the target polynucleotide sequence. In some embodiments, any of the base editor systems comprising one of the ABE8 base editor variants described herein result in less than 0.3% indel formation in the target polynucleotide sequence. In some embodiments, any of the base editor systems comprising one of the ABE8 base editor variants described results in lower indel formation in the target polynucleotide sequence compared to a base editor system comprising one of ABE7 base editors. In some embodiments, any of the base editor systems comprising one of the ABE8 base editor variants described herein results in lower indel formation in the target polynucleotide sequence compared to a base editor system comprising an ABE7.10.

[0819] In some embodiments, any of the base editor systems comprising one of the ABE8 base editor variants described herein has reduction in indel frequency compared to a base editor system comprising one of the ABE7 base editors. In some embodiments, any of the base editor systems comprising one of the ABE8 base editor variants described herein has at least 0.01%, at least 1%, at least 2%, at least 3%, at least 4%, at least 5%, at least 10%, at least 15%, at least 20%, at least 25%, at least 30%, at least 35%, at least 40%, at least 45%, at least 50%, at least 55%, at least 60%, at least 65%, at least 70%, at least 75%, at least 80%, at least 85%, at least 90%, or at least 95% reduction in indel frequency compared to a base editor system comprising one of the ABE7 base editors. In some embodiments, a base editor system comprising one of the ABE8 base editor variants described herein has at least 0.01%, at least 1%, at least 2%, at least 3%, at least 4%, at least 5%, at least 10%, at least 15%, at least 20%, at least 25%, at least 30%, at least 35%, at least 40%, at least 45%, at least 50%, at least 55%, at least 60%, at least 65%, at least 70%, at least 75%, at least 80%, at least 85%, at least 90%, or at least 95% reduction in indel frequency compared to a base editor system comprising an ABE7.10.

[0820] The invention provides adenosine deaminase variants (e.g., ABE8 variants) that have increased efficiency and specificity. In particular, the adenosine deaminase variants described herein are more likely to edit a desired base within a polynucleotide, and are less likely to edit bases that are not intended to be altered (e.g., “bystanders”).

[0821] In some embodiments, any of the base editing system comprising one of the ABE8 base editor variants described herein has reduced bystander editing or mutations. In some embodiments, an unintended editing or mutation is a bystander mutation or bystander editing, for example, base editing of a target base (e.g., A or C) in an unintended or non-target position in a target window of a target nucleotide sequence. In some embodiments, any of the base editing system comprising one of the ABE8 base editor variants described herein has reduced bystander editing or mutations compared to a base editor system comprising an ABE7 base editor, e.g., ABE7.10. In some embodiments, any of the base editing system comprising one of the ABE8 base editor variants described herein has reduced bystander editing or mutations by at least 1%, at least 2%, at least 3%, at least 4%, at least 5%, at least 10%, at least 15%, at least 20%, at least 25%, at least 30%, at least 35%, at least 40%, at least 45%, at least 50%, at least 55%, at least 60%, at least 65%, at least 70%, at least 75%, at least 80%, at least 85%, at least 90%, at least 95%, or at least 99% compared to a base editor system comprising an ABE7 base editor, e.g., ABE7.10. In some embodiments, any of the base editing system comprising one of the ABE8 base editor variants described herein has reduced bystander editing or mutations by at least 1.1 fold, at least 1.2 fold, at least 1.3 fold, at least 1.4 fold, at least 1.5 fold, at least 1.6 fold, at least 1.7 fold, at least 1.8 fold, at least 1.9 fold, at least 2.0 fold, at least 2.1 fold, at least 2.2 fold, at least 2.3 fold, at least 2.4 fold, at least 2.5 fold, at least 2.6 fold, at least 2.7 fold, at least 2.8 fold, at least 2.9 fold, or at least 3.0 fold compared to a base editor system comprising an ABE7 base editor, e.g., ABE7.10.

[0822] In some embodiments, any of the base editor systems provided herein result in less than 70%, less than 65%, less than 60%, less than 55%, 50%, less than 40%, less than 30%, less than 20%, less than 19%, less than 18%, less than 17%, less than 16%, less than 15%, less than 14%, less than 13%, less than 12%, less than 11%, less than 10%, less than 9%, less than 8%, less than 7%, less than 6%, less than 5%, less than 4%, less than 3%, less than 2%, less than 1%, less than 0.9%, less than 0.8%, less than 0.7%, less than 0.6%, less than 0.5%, less than 0.4%, less than 0.3%, less than 0.2%, less than 0.1%, less than 0.09%, less than 0.08%, less than 0.07%, less than 0.06%, less than 0.05%, less than 0.04%, less than 0.03%, less than 0.02%, or less than 0.01% bystander editing of one or more nucleotides (e.g., an off-target nucleotide).

[0823] In some embodiments, any of the base editing system comprising one of the ABE8 base editor variants described herein has reduced spurious editing. In some embodiments, an unintended editing or mutation is a spurious mutation or spurious editing, for example, non-specific editing or guide independent editing of a target base (e.g., A or C) in an unintended or non-target region of the genome. In some embodiments, any of the base editing system comprising one of the ABE8 base editor variants described herein has reduced spurious editing compared to a base editor system comprising an ABE7 base editor, e.g., ABE7.10. In some embodiments, any of the base editing system comprising one of the ABE8 base editor variants described herein has reduced spurious editing by at least 1%, at least 2%, at least 3%, at least 4%, at least 5%, at least 10%, at least 15%, at least 20%, at least 25%, at least 30%, at least 35%, at least 40%, at least 45%, at least 50%, at least 55%, at least 60%, at least 65%, at least 70%, at least 75%, at least 80%, at least 85%, at least 90%, at least 95%, or at least 99% compared to a base editor system comprising an ABE7 base editor, e.g., ABE7.10. In some embodiments, any of the base editing system comprising one of the ABE8 base editor variants described herein has reduced spurious editing by at least 1.1 fold, at least 1.2 fold, at least 1.3 fold, at least 1.4 fold, at least 1.5 fold, at least 1.6 fold, at least 1.7 fold, at least 1.8 fold, at least 1.9 fold, at least 2.0 fold, at least 2.1 fold, at least 2.2 fold, at least 2.3 fold, at least 2.4 fold, at least 2.5 fold, at least 2.6 fold, at least 2.7 fold, at least 2.8 fold, at least 2.9 fold, or at least 3.0 fold compared to a base editor system comprising an ABE7 base editor, e.g., ABE7.10.

[0824] In some embodiments, any of the ABE8 base editor variants described herein have at least 0.01%, at least 1%, at least 2%, at least 3%, at least 4%, at least 5%, at least 10%, at least 15%, at least 20%, at least 25%, at least 30%, at least 35%, at least 40%, at least 45%, at least 50%, at least 55%, at least 60%, at least 65%, at least 70%, at least 75%, at least 80%, at least 85%, at least 90%, at least 95%, or at least 99% base editing efficiency. In some embodiments, the base editing efficiency may be measured by calculating the percentage of edited nucleobases in a population of cells. In some embodiments, any of the ABE8 base editor variants described herein have base editing efficiency of at least 0.01%, at least 1%, at least 2%, at least 3%, at least 4%, at least 5%, at least 10%, at least 15%, at least 20%, at least 25%, at least 30%, at least 35%, at least 40%, at least 45%, at least 50%, at least 55%, at least 60%, at least 65%, at least 70%, at least 75%, at least 80%, at least 85%, at least 90%, at least 95%, or at least 99% as measured by edited nucleobases in a population of cells.

[0825] In some embodiments, any of the ABE8 base editor variants described herein has higher base editing efficiency compared to the ABE7 base editors. In some embodiments, any of the ABE8 base editor variants described herein have at least 1%, at least 2%, at least 3%, at least 4%, at least 5%, at least 10%, at least 15%, at least 20%, at least 25%, at least 30%, at least 35%, at least 40%, at least 45%, at least 50%, at least 55%, at least 60%, at least 65%, at least 70%, at least 75%, at least 80%, at least 85%, at least 90%, at least 95%, at least 99%, at least 100%, at least 105%, at least 110%, at least 115%, at least 120%, at least 125%, at least 130%, at least 135%, at least 140%, at least 145%, at least 150%, at least 155%, at least 160%, at least 165%, at least 170%, at least 175%, at least 180%, at least 185%, at least 190%, at least 195%, at least 200%, at least 210%, at least 220%, at least 230%, at least 240%, at least 250%, at least 260%, at least 270%, at least 280%, at least 290%, at least 300%, at least 310%, at least 320%, at least 330%, at least 340%, at least 350%, at least 360%, at least 370%, at least 380%, at least 390%, at least 400%, at least 450%, or at least 500% higher base editing efficiency compared to an ABE7 base editor, e.g., ABE7.10.

[0826] In some embodiments, any of the ABE8 base editor variants described herein has at least 1.1 fold, at least 1.2 fold, at least 1.3 fold, at least 1.4 fold, at least 1.5 fold, at least 1.6 fold, at least 1.7 fold, at least 1.8 fold, at least 1.9 fold, at least 2.0 fold, at least 2.1 fold, at least 2.2 fold, at least 2.3 fold, at least 2.4 fold, at least 2.5 fold, at least 2.6 fold, at least 2.7 fold, at least 2.8 fold, at least 2.9 fold, at least 3.0 fold, at least 3.1 fold, at least 3.2, at least 3.3 fold, at least 3.4 fold, at least 3.5 fold, at least 3.6 fold, at least 3.7 fold, at least 3.8 fold, at least 3.9 fold, at least 4.0 fold, at least 4.1 fold, at least 4.2 fold, at least 4.3 fold, at least 4.4 fold, at least 4.5 fold, at least 4.6 fold, at least 4.7 fold, at least 4.8 fold, at least 4.9 fold, or at least 5.0 fold higher base editing efficiency compared to an ABE7 base editor, e.g., ABE7.10.

[0827] In some embodiments, any of the ABE8 base editor variants described herein have at least 0.01%, at least 1%, at least 2%, at least 3%, at least 4%, at least 5%, at least 10%, at least 15%, at least 20%, at least 25%, at least 30%, at least 35%, at least 40%, at least 45%, at least 50%, at least 55%, at least 60%, at least 65%, at least 70%, at least 75%, at least 80%, at least 85%, at least 90%, at least 95%, or at least 99% on-target base editing efficiency. In some embodiments, any of the ABE8 base editor variants described herein have on-target base editing efficiency of at least 0.01%, at least 1%, at least 2%, at least 3%, at least 4%, at least 5%, at least 10%, at least 15%, at least 20%, at least 25%, at least 30%, at least 35%, at least 40%, at least 45%, at least 50%, at least 55%, at least 60%, at least 65%, at least 70%, at least 75%, at least 80%, at least 85%, at least 90%, at least 95%, or at least 99% as measured by edited target nucleobases in a population of cells.

[0828] In some embodiments, any of the ABE8 base editor variants described herein has higher on-target base editing efficiency compared to the ABE7 base editors. In some embodiments, any of the ABE8 base editor variants described herein have at least 1%, at least 2%, at least 3%, at least 4%, at least 5%, at least 10%, at least 15%, at least 20%, at least 25%, at least 30%, at least 35%, at least 40%, at least 45%, at least 50%, at least 55%, at least 60%, at least 65%, at least 70%, at least 75%, at least 80%, at least 85%, at least 90%, at least 95%, at least 99%, at least 100%, at least 105%, at least 110%, at least 115%, at least 120%, at least 125%, at least 130%, at least 135%, at least 140%, at least 145%, at least 150%, at least 155%, at least 160%, at least 165%, at least 170%, at least 175%, at least 180%, at least 185%, at least 190%, at least 195%, at least 200%, at least 210%, at least 220%, at least 230%, at least 240%, at least 250%, at least 260%, at least 270%, at least 280%, at least 290%, at least 300%, at least 310%, at least 320%, at least 330%, at least 340%, at least 350%, at least 360%, at least 370%, at least 380%, at least 390%, at least 400%, at least 450%, or at least 500% higher on-target base editing efficiency compared to an ABE7 base editor, e.g., ABE7.10.

[0829] In some embodiments, any of the ABE8 base editor variants described herein has at least 1.1 fold, at least 1.2 fold, at least 1.3 fold, at least 1.4 fold, at least 1.5 fold, at least 1.6 fold, at least 1.7 fold, at least 1.8 fold, at least 1.9 fold, at least 2.0 fold, at least 2.1 fold, at least 2.2 fold, at least 2.3 fold, at least 2.4 fold, at least 2.5 fold, at least 2.6 fold, at least 2.7 fold, at least 2.8 fold, at least 2.9 fold, at least 3.0 fold, at least 3.1 fold, at least 3.2 fold, at least 3.3 fold, at least 3.4 fold, at least 3.5 fold, at least 3.6 fold, at least 3.7 fold, at least 3.8 fold, at least 3.9 fold, at least 4.0 fold, at least 4.1 fold, at least 4.2 fold, at least 4.3 fold, at least 4.4 fold, at least 4.5 fold, at least 4.6 fold, at least 4.7 fold, at least 4.8 fold, at least 4.9 fold, or at least 5.0 fold higher on-target base editing efficiency compared to an ABE7 base editor, e.g., ABE7.10.

[0830] The ABE8 base editor variants described herein may be delivered to a host cell via a plasmid, a vector, a LNP complex, or an mRNA. In some embodiments, any of the ABE8 base editor variants described herein is delivered to a host cell as an mRNA. In some embodiments, an ABE8 base editor delivered via a nucleic acid based delivery system, e.g., an mRNA, has on-target editing efficiency of at least at least 1%, at least 2%, at least 3%, at least 4%, at least 5%, at least 10%, at least 15%, at least 20%, at least 25%, at least 30%, at least 35%, at least 40%, at least 45%, at least 50%, at least 55%, at least 60%, at least 65%, at least 70%, at least 75%, at least 80%, at least 85%, at least 90%, at least 95%, or at least 99% as measured by edited nucleobases. In some embodiments, an ABE8 base editor delivered by an mRNA system has higher base editing efficiency compared to an ABE8 base editor delivered by a plasmid or vector system. In some embodiments, any of the ABE8 base editor variants described herein has at least 1%, at least 2%, at least 3%, at least 4%, at least 5%, at least 10%, at least 15%, at least 20%, at least 25%, at least 30%, at least 35%, at least 40%, at least 45%, at least 50%, at least 55%, at least 60%, at least 65%, at least 70%, at least 75%, at least 80%, at least 85%, at least 90%, at least 95%, at least 99%, at least 100%, at least 105%, at least 110%, at least 115%, at least 120%, at least 125%, at least 130%, at least 135%, at least 140%, at least 145%, at least 150%, at least 155%, at least 160%, at least 165%, at least 170%, at least 175%, at least 180%, at least 185%, at least 190%, at least 195%, at least 200%, at least 210%, at least 220%, at least 230%, at least 240%, at least 250%, at least 260%, at least 270%, at least 280%, at least 290%, at least 300% higher, at least 310%, at least 320%, at least 330%, at least 340%, at least 350%, at least 360%, at least 370%, at least 380%, at least 390%, at least 400%, at least 450%, or at least 500% on-target editing efficiency when delivered by an mRNA system compared to when delivered by a plasmid or vector system. In some embodiments, any of the ABE8 base editor variants described herein has at least 1.1 fold, at least 1.2 fold, at least 1.3 fold, at least 1.4 fold, at least 1.5 fold, at least 1.6 fold, at least 1.7 fold, at least 1.8 fold, at least 1.9 fold, at least 2.0 fold, at least 2.1 fold, at least 2.2 fold, at least 2.3 fold, at least 2.4 fold, at least 2.5 fold, at least 2.6 fold, at least 2.7 fold, at least 2.8 fold, at least 2.9 fold, at least 3.0 fold, at least 3.1 fold, at least 3.2 fold, at least 3.3 fold, at least 3.4 fold, at least 3.5 fold, at least 3.6 fold, at least 3.7 fold, at least 3.8 fold, at least 3.9 fold, at least 4.0 fold, at least 4.1 fold, at least 4.2 fold, at least 4.3 fold, at least 4.4 fold, at least 4.5 fold, at least 4.6 fold, at least 4.7 fold, at least 4.8 fold, at least 4.9 fold, or at least 5.0 fold higher on-target editing efficiency when delivered by an mRNA system compared to when delivered by a plasmid or vector system.

[0831] In some embodiments, any of the base editor systems comprising one of the ABE8 base editor variants described herein result in less than 50%, less than 40%, less than 30%, less than 20%, less than 19%, less than 18%, less than 17%, less than 16%, less than 15%, less than 14%, less than 13%, less than 12%, less than 11%, less than 10%, less than 9%, less than 8%, less than 7%, less than 6%, less than 5%, less than 4%, less than 3%, less than 2%, less than 1%, less than 0.9%, less than 0.8%, less than 0.7%, less than 0.6%, less than 0.5%, less than 0.4%, less than 0.3%, less than 0.2%, less than 0.1%, less than 0.09%, less than 0.08%, less than 0.07%, less than 0.06%, less than 0.05%, less than 0.04%, less than 0.03%, less than 0.02%, or less than 0.01% off-target editing in the target polynucleotide sequence.

[0832] In some embodiments, any of the ABE8 base editor variants described herein has lower guided off-target editing efficiency when delivered by an mRNA system compared to when delivered by a plasmid or vector system. In some embodiments, any of the ABE8 base editor variants described herein has at least 1%, at least 2%, at least 3%, at least 4%, at least 5%, at least 10%, at least 15%, at least 20%, at least 25%, at least 30%, at least 35%, at least 40%, at least 45%, at least 50%, at least 55%, at least 60%, at least 65%, at least 70%, at least 75%, at least 80%, at least 85%, at least 90%, at least 95%, or at least 99% lower guided off-target editing efficiency when delivered by an mRNA system compared to when delivered by a plasmid or vector system. In some embodiments, any of the ABE8 base editor variants described herein has at least 1.1 fold, at least 1.2 fold, at least 1.3 fold, at least 1.4 fold, at least 1.5 fold, at least 1.6 fold, at least 1.7 fold, at least 1.8 fold, at least 1.9 fold, at least 2.0 fold, at least 2.1 fold, at least 2.2 fold, at least 2.3 fold, at least 2.4 fold, at least 2.5 fold, at least 2.6 fold, at least 2.7 fold, at least 2.8 fold, at least 2.9 fold, or at least 3.0 fold lower guided off-target editing efficiency when delivered by an mRNA system compared to when delivered by a plasmid or vector system. In some embodiments, any of the ABE8 base editor variants described herein has at least about 2.2 fold decrease in guided off-target editing efficiency when delivered by an mRNA system compared to when delivered by a plasmid or vector system.

[0833] In some embodiments, any of the ABE8 base editor variants described herein has lower guide-independent off-target editing efficiency when delivered by an mRNA system compared to when delivered by a plasmid or vector system. In some embodiments, any of the ABE8 base editor variants described herein has at least 1%, at least 2%, at least 3%, at least 4%, at least 5%, at least 10%, at least 15%, at least 20%, at least 25%, at least 30%, at least 35%, at least 40%, at least 45%, at least 50%, at least 55%, at least 60%, at least 65%, at least 70%, at least 75%, at least 80%, at least 85%, at least 90%, at least 95%, or at least 99% lower guide-independent off-target editing efficiency when delivered by an mRNA system compared to when delivered by a plasmid or vector system. In some embodiments, any of the ABE8 base editor variants described herein has at least 1.1 fold, at least 1.2 fold, at least 1.3 fold, at least 1.4 fold, at least 1.5 fold, at least 1.6 fold, at least 1.7 fold, at least 1.8 fold, at least 1.9 fold, at least 2.0 fold, at least 2.1 fold, at least 2.2 fold, at least 2.3 fold, at least 2.4 fold, at least 2.5 fold, at least 2.6 fold, at least 2.7 fold, at least 2.8 fold, at least 2.9 fold, at least 3.0 fold, at least 5.0 fold, at least 10.0 fold, at least 20.0 fold, at least 50.0 fold, at least 70.0 fold, at least 100.0 fold, at least 120.0 fold, at least 130.0 fold, or at least 150.0 fold lower guide-independent off-target editing efficiency when delivered by an mRNA system compared to when delivered by a plasmid or vector system. In some embodiments, ABE8 base editor variants described herein has 134.0 fold decrease in guide-independent off-target editing efficiency (e.g., spurious RNA deamination) when delivered by an mRNA system compared to when delivered by a plasmid or vector system. In some embodiments, ABE8 base editor variants described herein does not increase guide-independent mutation rates across the genome.

[0834] In some embodiments, a single gene delivery event (e.g., by transduction, transfection, electroporation or any other method) can be used to target base editing of 5 sequences within a cell's genome. In some embodiments, a single gene delivery event can be used to target base editing of 6 sequences within a cell's genome. In some embodiments, a single gene delivery event can be used to target base editing of 7 sequences within a cell's genome. In some embodiments, a single electroporation event can be used to target base editing of 8 sequences within a cell's genome. In some embodiments, a single gene delivery event can be used to target base editing of 9 sequences within a cell's genome. In some embodiments, a single gene delivery event can be used to target base editing of 10 sequences within a cell's genome. In some embodiments, a single gene delivery event can be used to target base editing of 20 sequences within a cell's genome. In some embodiments, a single gene delivery event can be used to target base editing of 30 sequences within a cell's genome. In some embodiments, a single gene delivery event can be used to target base editing of 40 sequences within a cell's genome. In some embodiments, a single gene delivery event can be used to target base editing of 50 sequences within a cell's genome.

[0835] In some embodiments, the method described herein, for example, the base editing methods has minimum to no off-target effects. In some embodiments, the method described herein, for example, the base editing methods, has minimal to no chromosomal translocations.

[0836] In some embodiments, the base editing method described herein results in at least 50% of a cell population that have been successfully edited (i.e., cells that have been successfully engineered). In some embodiments, the base editing method described herein results in at least 55% of a cell population that have been successfully edited. In some embodiments, the base editing method described herein results in at least 60% of a cell population that have been successfully edited. In some embodiments, the base editing method described herein results in at least 65% of a cell population that have been successfully edited. In some embodiments, the base editing method described herein results in at least 70% of a cell population that have been successfully edited. In some embodiments, the base editing method described herein results in at least 75% of a cell population that have been successfully edited. In some embodiments, the base editing method described herein results in at least 80% of a cell population that have been successfully edited. In some embodiments, the base editing method described herein results in at least 85% of a cell population that have been successfully edited. In some embodiments, the base editing method described herein results in at least 90% of a cell population that have been successfully edited. In some embodiments, the base editing method described herein results in at least 95% of a cell population that have been successfully edited. In some embodiments, the base editing method described herein results in about 91%, 92%, 93%, 94%, 95%, 96%, 97%, 98%, 99% or 100% of a cell population that have been successfully edited.

[0837] In some embodiments, the percent of viable cells in a cell population following a base editing intervention is greater than at least 60%, 70%, 80%, or 90% of the starting cell population at the time of the base editing event. In some embodiments, the percent of viable cells in a cell population following editing is about 70%. In some embodiments, the percent of viable cells in a cell population following editing is about 75%. In some embodiments, the percent of viable cells in a cell population following editing is about 80%. In some embodiments, the percent of viable cells in a cell population as described above is about 85%. In some embodiments, the percent of viable cells in a cell population as described above is about 90%, or about 91%, 92%, 93%, 94% 95%, 96%, 97%, 98%, 99%, or 100% of the cells in the population at the time of the base editing event. In some embodiments the engineered cell population can be further expanded in vitro by about 2 fold, about 3-fold, about 4-fold, about 5-fold, about 6-fold, about 7-fold, about 8-fold, about 9-fold, about 10-fold, about 15-fold, about 20-fold, about 25-fold, about 30-fold, about 35-fold, about 40-fold, about 45-fold, about 50-fold, or about 100-fold . . . .

[0838] In embodiments, the cell population is a population of cells contacted with a base editor, complex, or base editor system of the present disclosure. In some embodiments the engineered cell population can be further expanded in vitro by about 2 fold, about 3-fold, about 4-fold, about 5-fold, about 6-fold, about 7-fold, about 8-fold, about 9-fold, about 10-fold, about 15-fold, about 20-fold, about 25-fold, about 30-fold, about 35-fold, about 40-fold, about 45-fold, about 50-fold, or about 100-fold.

[0839] The number of intended mutations and indels can be determined using any suitable method, for example, as described in International PCT Application Nos. PCT/US2017/045381 (WO2018/027078) and PCT/US2016/058344 (WO2017/070632); Komor, A. C., et al., “Programmable editing of a target base in genomic DNA without double-stranded DNA cleavage” Nature 533, 420-424 (2016); Gaudelli, N. M., et al., “Programmable base editing of A•T to G•C in genomic DNA without DNA cleavage” Nature 551, 464-471 (2017); and Komor, A. C., et al., “Improved base excision repair inhibition and bacteriophage Mu Gam protein yields C:G-to-T:A base editors with higher efficiency and product purity” Science Advances 3:eaao4774 (2017); the entire contents of which are hereby incorporated by reference.

[0840] In some embodiments, to calculate indel frequencies, sequencing reads are scanned for exact matches to two 10-bp sequences that flank both sides of a window in which indels can occur. If no exact matches are located, the read is excluded from analysis. If the length of this indel window exactly matches the reference sequence the read is classified as not containing an indel. If the indel window is two or more bases longer or shorter than the reference sequence, then the sequencing read is classified as an insertion or deletion, respectively. In some embodiments, the base editors provided herein can limit formation of indels in a region of a nucleic acid. In some embodiments, the region is at a nucleotide targeted by a base editor or a region within 2, 3, 4, 5, 6, 7, 8, 9, or 10 nucleotides of a nucleotide targeted by a base editor.

[0841] The number of indels formed at a target nucleotide region can depend on the amount of time a nucleic acid (e.g., a nucleic acid within the genome of a cell) is exposed to a base editor. In some embodiments, the number or proportion of indels is determined after at least 1 hour, at least 2 hours, at least 6 hours, at least 12 hours, at least 24 hours, at least 36 hours, at least 48 hours, at least 3 days, at least 4 days, at least 5 days, at least 7 days, at least 10 days, or at least 14 days of exposing the target nucleotide sequence (e.g., a nucleic acid within the genome of a cell) to a base editor. It should be appreciated that the characteristics of the base editors as described herein can be applied to any of the fusion proteins or complexes, or methods of using the fusion proteins or complexes provided herein.

[0842] Details of base editor efficiency are described in International PCT Application Nos. PCT/2017/045381 (WO 2018/027078) and PCT/US2016/058344 (WO 2017/070632), each of which is incorporated herein by reference for its entirety. Also see Komor, A. C., et al., “Programmable editing of a target base in genomic DNA without double-stranded DNA cleavage” Nature 533, 420-424 (2016); Gaudelli, N. M., et al., “Programmable base editing of A•T to G•C in genomic DNA without DNA cleavage” Nature 551, 464-471 (2017); and Komor, A. C., et al., “Improved base excision repair inhibition and bacteriophage Mu Gam protein yields C:G-to-T:A base editors with higher efficiency and product purity” Science Advances 3:eaao4774 (2017), the entire contents of which are hereby incorporated by reference. In some embodiments, editing of a plurality of nucleobase pairs in one or more genes using the methods provided herein results in formation of at least one intended mutation. In some embodiments, said formation of said at least one intended mutation results in the disruption the normal function of a gene. In some embodiments, said formation of said at least one intended mutation results decreases or eliminates the expression of a protein encoded by a gene. It should be appreciated that multiplex editing can be accomplished using any method or combination of methods provided herein.

### Multiplex Editing

[0843] In some embodiments, the base editor system provided herein is capable of multiplex editing of a plurality of nucleobase pairs in one or more genes or polynucleotide sequences. In some embodiments, the plurality of nucleobase pairs is located in the same gene or in one or more genes, wherein at least one gene is located in a different locus. In some embodiments, the multiplex editing comprises one or more guide polynucleotides. In some embodiments, the multiplex editing comprises one or more base editor systems. In some embodiments, the multiplex editing comprises one or more base editor systems with a single guide polynucleotide or a plurality of guide polynucleotides. In some embodiments, the multiplex editing comprises one or more guide polynucleotides with a single base editor system. In some embodiments, the multiplex editing comprises at least one guide polynucleotide that does or does not require a PAM sequence to target binding to a target polynucleotide sequence. In some embodiments, the multiplex editing comprises a mix of at least one guide polynucleotide that does not require a PAM sequence to target binding to a target polynucleotide sequence and at least one guide polynucleotide that require a PAM sequence to target binding to a target polynucleotide sequence. It should be appreciated that the characteristics of the multiplex editing using any of the base editors as described herein can be applied to any combination of methods using any base editor provided herein. It should also be appreciated that the multiplex editing using any of the base editors as described herein can comprise a sequential editing of a plurality of nucleobase pairs.

[0844] In some embodiments, the plurality of nucleobase pairs are in one more genes. In some embodiments, the plurality of nucleobase pairs is in the same gene. In some embodiments, at least one gene in the one more genes is located in a different locus.

[0845] In some embodiments, the editing is editing of the plurality of nucleobase pairs in at least one protein coding region, in at least one protein non-coding region, or in at least one protein coding region and at least one protein non-coding region.

[0846] In some embodiments, the editing is in conjunction with one or more guide polynucleotides. In some embodiments, the base editor system comprises one or more base editor systems. In some embodiments, the base editor system comprises one or more base editor systems in conjunction with a single guide polynucleotide or a plurality of guide polynucleotides. In some embodiments, the editing is in conjunction with one or more guide polynucleotide with a single base editor system. In some embodiments, the editing is in conjunction with at least one guide polynucleotide that does not require a PAM sequence to target binding to a target polynucleotide sequence or with at least one guide polynucleotide that requires a PAM sequence to target binding to a target polynucleotide sequence, or with a mix of at least one guide polynucleotide that does not require a PAM sequence to target binding to a target polynucleotide sequence and at least one guide polynucleotide that does require a PAM sequence to target binding to a target polynucleotide sequence. It should be appreciated that the characteristics of the multiplex editing using any of the base editors as described herein can be applied to any of combination of the methods of using any of the base editors provided herein. It should also be appreciated that the editing can comprise a sequential editing of a plurality of nucleobase pairs.

[0847] In some embodiments, the base editor system capable of multiplex editing of a plurality of nucleobase pairs in one or more genes comprises one of ABE7, ABE8, and/or ABE9 base editors. In some embodiments, the base editor system capable of multiplex editing comprising one of the ABE8 base editor variants described herein has higher multiplex editing efficiency compared to the base editor system capable of multiplex editing comprising one of ABE7 base editors. In some embodiments, the base editor system capable of multiplex editing comprising one of the ABE8 base editor variants described herein has at least 1%, at least 2%, at least 3%, at least 4%, at least 5%, at least 10%, at least 15%, at least 20%, at least 25%, at least 30%, at least 35%, at least 40%, at least 45%, at least 50%, at least 55%, at least 60%, at least 65%, at least 70%, at least 75%, at least 80%, at least 85%, at least 90%, at least 95%, at least 99%, at least 100%, at least 105%, at least 110%, at least 115%, at least 120%, at least 125%, at least 130%, at least 135%, at least 140%, at least 145%, at least 150%, at least 155%, at least 160%, at least 165%, at least 170%, at least 175%, at least 180%, at least 185%, at least 190%, at least 195%, at least 200%, at least 210%, at least 220%, at least 230%, at least 240%, at least 250%, at least 260%, at least 270%, at least 280%, at least 290%, at least 300% higher, at least 310%, at least 320%, at least 330%, at least 340%, at least 350%, at least 360%, at least 370%, at least 380%, at least 390%, at least 400%, at least 450%, or at least 500% higher multiplex editing efficiency compared the base editor system capable of multiplex editing comprising one of ABE7 base editors. In some embodiments, the base editor system capable of multiplex editing comprising one of the ABE8 base editor variants described herein has at least 1.1 fold, at least 1.2 fold, at least 1.3 fold, at least 1.4 fold, at least 1.5 fold, at least 1.6 fold, at least 1.7 fold, at least 1.8 fold, at least 1.9 fold, at least 2.0 fold, at least 2.1 fold, at least 2.2 fold, at least 2.3 fold, at least 2.4 fold, at least 2.5 fold, at least 2.6 fold, at least 2.7 fold, at least 2.8 fold, at least 2.9 fold, at least 3.0 fold, at least 3.1 fold, at least 3.2 fold, at least 3.3 fold, at least 3.4 fold, at least 3.5 fold, at least 4.0 fold, at least 4.5 fold, at least 5.0 fold, at least 5.5 fold, or at least 6.0 fold higher multiplex editing efficiency compared the base editor system capable of multiplex editing comprising one of ABE7 base editors. In some embodiments, use of a base editor system capable of multiplex editing of a plurality of nucleobase pairs in one or more genes described herein does not comprise a risk or occurance of chromosomal translocations.

### Expression of Fusion Proteins or Complexes in a Host Cell

[0848] Fusion proteins or complexes of the invention comprising an adenosine deaminase variant may be expressed in virtually any host cell of interest, including but not limited to animal cells using routine methods known to the skilled artisan. For example, a DNA encoding an adenosine deaminase of the invention can be cloned by designing suitable primers for the upstream and downstream of CDS based on the cDNA sequence The cloned DNA may be directly, or after digestion with a restriction enzyme when desired, or after addition of a suitable linker and/or a nuclear localization signal, ligated with a DNA encoding one or more additional components of a base editing system. The base editing system is translated in a host cell to form a complex.

[0849] A DNA encoding a protein domain described herein can be obtained by chemically synthesizing the DNA, or by connecting synthesized partly overlapping oligoDNA short chains by utilizing the PCR method and the Gibson Assembly method to construct a DNA encoding the full length thereof. The advantage of constructing a full-length DNA by chemical synthesis or a combination of PCR method or Gibson Assembly method is that the codon to be used can be designed in CDS full-length according to the host into which the DNA is introduced. In the expression of a heterologous DNA, the protein expression level is expected to increase by converting the DNA sequence thereof to a codon highly frequently used in the host organism. As the data of codon use frequency in host to be used, for example, the genetic code use frequency database (kazusa.or.jp/codon/index.html) disclosed in the home page of Kazusa DNA Research Institute can be used, or documents showing the codon use frequency in each host may be referred to. By reference to the obtained data and the DNA sequence to be introduced, codons showing low use frequency in the host from among those used for the DNA sequence may be converted to a codon coding the same amino acid and showing high use frequency.

[0850] An expression vector containing a DNA encoding a nucleic acid sequence-recognizing module and/or a nucleic acid base converting enzyme can be produced, for example, by linking the DNA to the downstream of a promoter in a suitable expression vector.

[0851] As the expression vector, animal cell expression plasmids (e.g., pA1-11, pXT1, pRc/CMV, pRc/RSV, pcDNAI/Neo) are known in the art; animal virus vectors such as retrovirus, vaccinia virus, adenovirus and the like, and the like are used.

[0852] Regarding the promoter to be used, any promoter appropriate for a host to be used for gene expression can be used. In a conventional method using double-stranded breaks, since the survival rate of the host cell sometimes decreases markedly due to the toxicity, it is desirable to increase the number of cells by the start of the induction by using an inductive promoter. However, since sufficient cell proliferation can also be afforded by expressing the nucleic acid-modifying enzyme complex of the present invention, a constitutive promoter can be used without limitation.

[0853] For example, when the host is an animal cell, an SR.alpha. promoter, SV40 promoter, LTR promoter, cytomegalovirus (CMV) promoter, Rous sarcoma virus (RSV) promoter, Moloney mouse leukemia virus (MoMuLV), LTR, herpes simplex virus thymidine kinase (HSV-TK) promoter, and the like can be used. Of these, CMV promoter, SR.alpha. promoter and the like are preferable.

[0854] Expression vectors for use in the present invention, besides those mentioned above, can comprise an enhancer, a splicing signal, a terminator, a polyA addition signal, a selection marker such as drug resistance gene, an auxotrophic complementary gene and the like, a replication origin, and the like can be used.

[0855] An RNA encoding a protein domain described herein can be prepared by, for example, in vitro transcription of a nucleic acid sequence encoding any of the fusion proteins or complexes disclosed herein.

[0856] A fusion protein or complex of the invention can be intracellularly expressed by introducing into the cell an expression vector comprising a nucleic acid sequence encoding the fusion protein or complex.

[0857] Mammalian cells contemplated in the present invention include, but are not limited to, cell lines such as Human Embryonic Kidney (HEK) cells, monkey COS-7 cells, monkey Vero cells, Chinese hamster ovary (CHO) cells, dhfr gene-deficient CHO cells, mouse L cells, mouse AtT-20 cells, mouse myeloma cells, rat GH3 cells, human FL cells and the like, pluripotent stem cells such as iPS cells, ES cells derived humans and other mammals, and primary cultured cells prepared from various tissues. Furthermore, zebrafish embryo, Xenopus oocyte, and the like can also be used.

[0858] Using conventional methods, mutations, in principle, introduced into only one homologous chromosome produce a heterogenous cell. Therefore, the desired phenotype is not expressed unless the mutation is dominant. For recessive mutations, acquiring a homozygous cell can be inconvenient due to labor and time requirements. In contrast, according to the present invention, since a mutation can be introduced into any allele on the homologous chromosome in the genome, the desired phenotype can be expressed in a single generation even in the case of recessive mutation, thereby solving the problem associated with conventional mutagenesis methods.

[0859] An expression vector can be introduced by a known method (e.g., the lysozyme method, the competent method, the PEG method, the CaCl₂) coprecipitation method, electroporation, microinjection, particle gun method, lipofection, Agrobacterium-mediated delivery, etc.) according to the kind of the host.

[0860] A vector can be introduced into an animal cell according to the methods described in, for example, Cell Engineering additional volume 8, New Cell Engineering Experiment Protocol, 263-267 (1995) (published by Shujunsha), and Virology, 52, 456 (1973).

[0861] A cell comprising a vector can be cultured according to a known method according to the kind of the host.

[0862] As a medium for culturing an animal cell, for example, minimum essential medium (MEM) containing about 5 to about 20% of fetal bovine serum [Science, 122, 501 (1952)], Dulbecco's modified Eagle medium (DMEM) [Virology, 8, 396 (1959)], RPMI 1640 medium [The Journal of the American Medical Association, 199, 519 (1967)], 199 medium [Proceeding of the Society for the Biological Medicine, 73, 1 (1950)] and the like are used. The pH of the medium is preferably about 6 to about 8. The culture is performed at generally about 30° C. to about 40° C. Where necessary, aeration and stirring may be performed.

[0863] When a higher eukaryotic cell, such as animal cell, is used as a host cell, a DNA encoding a base editing system of the present invention (e.g., comprising an adenosine deaminase variant) is introduced into a host cell under the regulation of an inducible promoter (e.g., metallothionein promoter (induced by heavy metal ion), heat shock protein promoter (induced by heat shock), Tet-ON/Tet-OFF system promoter (induced by addition or removal of tetracycline or a derivative thereof), steroid-responsive promoter (induced by steroid hormone or a derivative thereof) etc.), the induction substance is added to the medium (or removed from the medium) at an appropriate stage to induce expression of the nucleic acid-modifying enzyme complex, culture is performed for a given period to carry out a base editing and, introduction of a mutation into a target gene, transient expression of the base editing system can be realized.

[0864] Alternatively, the above-mentioned inductive promoter can also be utilized as a vector removal mechanism when higher eukaryotic cells, such as animal cell are used as a host cell. That is, a vector is mounted with a replication origin that functions in a host cell, and a nucleic acid encoding a protein necessary for replication (e.g., SV40 on and large T antigen, oriP and EBNA-1 etc. for animal cells), of the expression of the nucleic acid encoding the protein is regulated by the above-mentioned inducible promoter. As a result, while the vector is autonomously replicable in the presence of an induction substance, when the induction substance is removed, autonomous replication is not available, and the vector naturally falls off along with cell division (autonomous replication is not possible by the addition of tetracycline and doxycycline in Tet-OFF system vector).

### Reducing Expression of Target Genes in Cells

[0865] In some embodiments, provided herein is a cell, such as a neuron (e.g., a motor neuron, such as an alpha-motor neuron), with at least one modification in an endogenous gene or regulatory elements thereof. In some embodiments, the cell may comprise a further modification in at least one, two, three, four, five, six, seven, eight, nine, ten, eleven, twelve, thirteen, fourteen, fifteen, sixteen, seventeen, eighteen, nineteen, twenty or more endogenous genes or regulatory elements thereof. In some embodiments, the at least one modification is a single nucleobase modification. In some embodiments, the at least one modification is by base editing. The base editing may be positioned at any suitable position of the gene, or in a regulatory element of the gene. Thus, it may be appreciated that a single base editing at a start codon, for example, can completely abolish the expression of the gene. In some embodiments, the base editing may be performed at a site within an exon. In some embodiments, the base editing may be performed at a site on more than one exons. In some embodiments, the base editing may be performed at any exon of the multiple exons in a gene. In some embodiments, base editing may introduce a premature STOP codon into an exon, resulting in either lack of a translated product or in a truncated that may be misfolded and thereby eliminated by degradation, or may produce an unstable mRNA that is readily degraded. In some embodiments, the cell is a neuron.

[0866] In some embodiments, the gene is an SMN1 and/or SMN2 polynucleotide.

[0867] In some embodiments, the editing of the endogenous gene reduces expression of the gene. In some embodiments, the editing of the endogenous gene reduces expression of the gene by at least 50% as compared to a control cell without the alteration. In some embodiments, the editing of the endogenous gene reduces expression of the gene by at least 60% as compared to a control cell without the alteration. In some embodiments, the editing of the endogenous gene reduces expression of the gene by at least 70% as compared to a control cell without the alteration. In some embodiments, the editing of the endogenous gene reduces expression of the gene by at least 80% as compared to a control cell without the alteration. In some embodiments, the editing of the endogenous gene reduces expression of the gene by at least 90% as compared to a control cell without the alteration. In some embodiments, the editing of the endogenous gene reduces expression of the gene by at least 100% as compared to a control cell without the alteration. In some embodiments, the editing of the endogenous gene eliminates gene expression.

[0868] In some embodiments, base editing may be performed on an intron. For example, base editing may be performed on an intron. In some embodiments, the base editing may be performed at a site within an intron. In some embodiments, the base editing may be performed at a site one or more introns. In some embodiments, the base editing may be performed at any exon of the multiple introns in a gene. In some embodiments, one or more base editing may be performed on an exon, an intron or any combination of exons and introns.

[0869] In some embodiments, the modification or base edit may be within a promoter site. In some embodiments, the base edit may be introduced within an alternative promoter site. In some embodiments, the base edit may be in a 5′ regulatory element, such as an enhancer. In some embodiment, base editing may be introduced to disrupt the binding site of a nucleic acid binding protein. Exemplary nucleic acid binding proteins may be a polymerase, nuclease, gyrase, topoisomerase, methylase or methyl transferase, transcription factors, enhancer, PABP, zinc finger proteins, among many others.

[0870] In some embodiments, base editing may be used for splice disruption to silence target protein expression. In some embodiments, base editing may generate a splice acceptor-splice donor (SA-SD) site. Targeted base editing generating a SA-SD, or at a SA-SD site can result in reduced or increased expression of a gene. In some embodiments, base editors (e.g., ABE, CBE) are used to target dinucleotide motifs that constitute splice acceptor and splice donor sites, which are the first and last two nucleotides of each intron. In some embodiments, splice disruption is achieved with an adenosine base editor (ABE). In some embodiments, splice disruption is achieved with a cytidine base editor (CBE). In some embodiments, base editors (e.g., ABE, CBE) are used to edit exons by creating STOP codons.

[0871] In some embodiments, provided herein is a cell (e.g., a motor neuron, such as an alpha-motor neuron) with at least one modification in one or more endogenous genes. In some embodiments, the cell may have at least one modification in one, two, three, four, five, six, seven, eight, nine, ten, eleven, twelve, thirteen, fourteen, fifteen, sixteen, seventeen, eighteen, nineteen, twenty or more endogenous genes. In some embodiments, the modification generates a premature stop codon in the endogenous genes. In some embodiments, the STOP codon silences target protein expression. In some embodiments, the modification is a single base modification. In some embodiments, the modification is generated by base editing. The premature stop codon may be generated in an exon, an intron, or an untranslated region. In some embodiments, base editing may be used to introduce more than one STOP codon, in one or more alternative reading frames. In some embodiments, the stop codon is generated by a adenosine base editor (ABE). In some embodiments, the stop codon is generated by a cytidine base editor (CBE). In some embodiments, the CBE generates any one of the following edits (shown in underlined font) to generate a STOP codon: CAG→TAG; CAA→TAA; CGA→TGA; TGG→TGA; TGG→TAG; or TGG→TAA.

[0872] In some embodiments, modification/base edits may be introduced at a 3′-UTR, for example, in a poly adenylation (poly-A) site. In some embodiments, base editing may be performed on a 5′-UTR region.

### Delivery System

[0873] The suitability of nucleobase editors to target one or more nucleotides in a polynucleotide sequence (e.g., an SMN2 polynucleotide) is evaluated as described herein. In one embodiment, a single cell of interest is transfected, transduced, or otherwise modified with a nucleic acid molecule or molecules encoding a base editing system described herein together with a small amount of a vector encoding a reporter (e.g., GFP). These cells can be any cell line known in the art, including neuron cell lines. Alternatively, primary cells (e.g., human) may be used. Cells may also be obtained from a subject or individual, such as from tissue biopsy, surgery, blood, plasma, serum, or other biological fluid. Such cells may be relevant to the eventual cell target.

[0874] Delivery may be performed using a viral vector (e.g., an adeno-associated virus (AAV) vector). In one embodiment, transfection may be performed using lipid transfection (such as Lipofectamine or Fugene) or by electroporation. Transfection may be performed using lipid nanoparticles (LNPs). Following transfection, expression of a reporter (e.g., GFP) can be determined either by fluorescence microscopy or by flow cytometry to confirm consistent and high levels of transfection. These preliminary transfections can comprise different nucleobase editors to determine which combinations of editors give the greatest activity. The system can comprise one or more different vectors. In one embodiment, the base editor is codon optimized for expression of the desired cell type, preferentially a eukaryotic cell, preferably a mammalian cell or a human cell. The activity of the nucleobase editor is assessed as described herein, i.e., by sequencing the genome of the cells to detect alterations in a target sequence. For Sanger sequencing, purified PCR amplicons are cloned into a plasmid backbone, transformed, miniprepped and sequenced with a single primer. Sequencing may also be performed using next generation sequencing (NGS) techniques. When using next generation sequencing, amplicons may be 300-500 bp with the intended cut site placed asymmetrically. Following PCR, next generation sequencing adapters and barcodes (for example Illumina multiplex adapters and indexes) may be added to the ends of the amplicon, e.g., for use in high throughput sequencing (for example on an Illumina MiSeq). The fusion proteins or complexes that induce the greatest levels of target specific alterations in initial tests can be selected for further evaluation.

[0875] In particular embodiments, the nucleobase editors are used to target polynucleotides of interest. In one embodiment, a nucleobase editor of the invention is delivered to cells (e.g., motor neurons, such as alpha-motor neurons) in conjunction with one or more guide RNAs that are used to target one or more nucleic acid sequences of interest within the genome of a cell, thereby altering the target gene(s) (e.g., an SMN2 polynucleotide). In some embodiments, a base editor is targeted by one or more guide RNAs to introduce one or more edits to the sequence of one or more genes of interest (e.g., an SMN2 polynucleotide). In some embodiments, the one or more edits to the sequence of one or more genes of interest decrease or eliminate expression of the protein encoded by the gene in the host cell (e.g., a motor neuron, such as an alpha-motor neuron). In some embodiments, expression of one or more proteins encoded by one or more genes of interest (e.g., an SMN2 polynucleotide) is increased in the host cell (e.g., a motor neuron, such as an alpha-motor neuron).

[0876] In some embodiments, the host cell is selected from a bacterial cell, plant cell, insect cell, human cell, or mammalian cell. In some embodiments, the host cell is a mammalian cell. In some embodiments, the host cell is a human cell. In some embodiments, the cell is in vitro. In some embodiments, the cell is in vivo.

### Nucleic Acid-Based Delivery of Base Editor Systems

[0877] Nucleic acid molecules encoding a base editor system according to the present disclosure can be administered to subjects or delivered into cells in vitro or in vivo by art-known methods or as described herein. For example, a base editor system comprising a deaminase (e.g., cytidine or adenine deaminase) can be delivered by vectors (e.g., viral or non-viral vectors), or by naked DNA, DNA complexes, lipid nanoparticles, or a combination of the aforementioned compositions.

[0878] Nanoparticles, which can be organic or inorganic, are useful for delivering a base editor system or component thereof. Nanoparticles are well known in the art and any suitable nanoparticle can be used to deliver a base editor system or component thereof, or a nucleic acid molecule encoding such components. In one example, organic (e.g. lipid and/or polymer) nanoparticles are suitable for use as delivery vehicles in certain embodiments of this disclosure. Exemplary lipids for use in nanoparticle formulations, and/or gene transfer are shown in Table 17 (below). Non-limiting examples of lipid nanoparticles suitable for use in the methods of the present disclosure include those described in International Patent Application Publications No. WO2022140239, WO2022140252, WO2022140238, WO2022159421, WO2022159472, WO2022159475, WO2022159463, WO2021113365, and WO2021141969, the disclosures of each of which is incorporated herein by reference in its entirety for all purposes.

TABLE 17
Lipids used for gene transfer.
Lipids Used for Gene Transfer

| Lipid | Abbreviation | Feature |
|---|---|---|
| 1,2-Dioleoyl-sn-glycero-3-phosphatidylcholine | DOPC | Helper |
| 1,2-Dioleoyl-sn-glycero-3-phosphatidylethanolamine | DOPE | Helper |
| Cholesterol | | Helper |
| N-[1-(2,3-Dioleyloxy)prophyl]N,N,N-trimethylammonium | DOTMA | Cationic |
| chloride | | |
| 1,2-Dioleoyloxy-3-trimethylammonium-propane | DOTAP | Cationic |
| Dioctadecylamidoglycylspermine | DOGS | Cationic |
| N-(3-Aminopropyl)-N,N-dimethyl-2,3-bis(dodecyloxy)-1- | GAP-DLRIE | Cationic |
| propanaminium bromide | | |
| Cetyltrimethylammonium bromide | CTAB | Cationic |
| 6-Lauroxyhexyl ornithinate | LHON | Cationic |
| 1-(2,3-Dioleoyloxypropyl)-2,4,6-trimethylpyridinium | 2Oc | Cationic |
| 2,3-Dioleyloxy-N-[2(sperminecarboxamido-ethyl]-N,N- | DOSPA | Cationic |
| dimethyl-1-propanaminium trifluoroacetate | | |
| 1,2-Dioleyl-3-trimethylammonium-propane | DOPA | Cationic |
| N-(2-Hydroxyethyl)-N,N-dimethyl-2,3-bis(tetradecyloxy)-1- | MDRIE | Cationic |
| propanaminium bromide | | |
| Dimyristooxypropyl dimethyl hydroxyethyl ammonium bromide | DMRI | Cationic |
| 3B-[N-(N′,N′-Dimethylaminoethane)-carbamoyl]cholesterol | DC-Chol | Cationic |
| Bis-guanidium-tren-cholesterol | BGTC | Cationic |
| 1,3-Diodeoxy-2-(6-carboxy-spermyl)-propylamide | DOSPER | Cationic |
| Dimethyloctadecylammonium bromide | DDAB | Cationic |
| Dioctadecylamidoglicylspermidin | DSL | Cationic |
| rac-[(2,3-Dioctadecyloxypropyl)(2-hydroxyethyl)]- | CLIP-1 | Cationic |
| dimethylammonium chloride | | |
| rac-[2(2,3-Dihexadecyloxypropyl- | CLIP-6 | Cationic |
| oxymethyloxy)ethyl]trimethylammoniun bromide | | |
| Ethyldimyristoylphosphatidylcholine | EDMPC | Cationic |
| 1,2-Distearyloxy-N,N-dimethyl-3-aminopropane | DSDMA | Cationic |
| 1,2-Dimyristoyl-trimethylammonium propane | DMTAP | Cationic |
| O,O′-Dimyristyl-N-lysyl aspartate | DMKE | Cationic |
| 1,2-Distearoyl-sn-glycero-3-ethylpho sphocholine | DSEPC | Cationic |
| N-Palmitoyl D-erythro-sphingosyl carbamoyl-spermine | CCS | Cationic |
| N-t-Butyl-N0-tetradecyl-3-tetradecylaminopropionamidine | diC14-amidine | Cationic |
| Octadecenolyoxy[ethyl-2-heptadeceny1-3 hydroxyethyl] | DOTIM | Cationic |
| imidazolinium chloride | | |
| N1-Cholesteryloxycarbonyl-3,7-diazanonane-1,9-diamine | CDAN | Cationic |
| 2-(3-[Bis(3-amino-propyl)-amino]propylamino)-N- | RPR209120 | Cationic |
| ditetradecylcarbamoylme-ethyl-acetamide | | |
| 1,2-dilinoleyloxy-3-dimethylaminopropane | DLinDMA | Cationic |
| 2,2-dilinoleyl-4-dimethylaminoethyl-[1,3]-dioxolane | DLin-KC2- | Cationic |
| | DMA | |
| dilinoleyl-methyl-4-dimethylaminobutyrate | DLin-MC3- | Cationic |
| | DMA | |

[0879] Table 18 lists exemplary polymers for use in gene transfer and/or nanoparticle formulations.

TABLE 18
Polymers used for gene transfer.
Polymers Used for Gene Transfer

| Polymer | Abbreviation |
|---|---|
| Poly(ethylene)glycol | PEG |
| Polyethylenimine | PEI |
| Dithiobis (succinimidylpropionate) | DSP |
| Dimethyl-3,3′-dithiobispropionimidate | DTBP |
| Poly(ethylene imine)biscarbamate | PEIC |
| Poly(L-lysine) | PLL |
| Histidine modified PLL | |
| Poly(N-vinylpyrrolidone) | PVP |
| Poly(propylenimine) | PPI |
| Poly(amidoamine) | PAMAM |
| Poly(amidoethylenimine) | SS-PAEI |
| Triethylenetetramine | TETA |
| Poly(β-aminoester) | |
| Poly(4-hydroxy-L-proline ester) | PHP |
| Poly(allylamine) | |
| Poly(α-[4-aminobutyl]-L-glycolic acid) | PAGA |
| Poly(D,L-lactic-co-glycolic acid) | PLGA |
| Poly(N-ethyl-4-vinylpyridinium bromide) | |
| Poly(phosphazene)s | PPZ |
| Poly(phosphoester)s | PPE |
| Poly(phosphoramidate)s | PPA |
| Poly(N-2-hydroxypropylmethacrylamide) | pHPMA |
| Poly (2-(dimethylamino)ethyl methacrylate) | pDMAEMA |
| Poly(2-aminoethyl propylene phosphate) | PPE-EA |
| Chitosan | |
| Galactosylated chitosan | |
| N-Dodacylated chitosan | |
| Histone | |
| Collagen | |
| Dextran-spermine | D-SPM |

[0880] Table 19 summarizes delivery methods for a polynucleotide encoding a fusion protein or complex described herein.

TABLE 19
Delivery methods.

| | | Delivery into | | | Type of |
|---|---|---|---|---|---|
| | | Non-Dividing | Duration of | Genome | Molecule |
| Delivery | Vector/Mode | Cells | Expression | Integration | Delivered |
| Physical | (e.g., | YES | Transient | NO | Nucleic Acids |
| | electroporation, | | | | and Proteins |
| | particle gun, | | | | |
| | Calcium | | | | |
| | Phosphate | | | | |
| | transfection | | | | |
| Viral | Retrovirus | NO | Stable | YES | RNA |
| | Lentivirus | YES | Stable | YES/NO with | RNA |
| | | | | modification | |
| | Adenovirus | YES | Transient | NO | DNA |
| | Adeno- | YES | Stable | NO | DNA |
| | Associated | | | | |
| | Virus (AAV) | | | | |
| | Vaccinia Virus | YES | Very | NO | DNA |
| | | | Transient | | |
| | Herpes Simplex | YES | Stable | NO | DNA |
| | Virus | | | | |
| Non-Viral | Cationic | YES | Transient | Depends on | Nucleic Acids |
| | Liposomes | | | what is | and Proteins |
| | | | | delivered | |
| | Polymeric | YES | Transient | Depends on | Nucleic Acids |
| | Nanoparticles | | | what is | and Proteins |
| | | | | delivered | |
| Biological | Attenuated | YES | Transient | NO | Nucleic Acids |
| Non-Viral | Bacteria | | | | |
| Delivery | Engineered | YES | Transient | NO | Nucleic Acids |
| Vehicles | Bacteriophages | | | | |
| | Mammalian | YES | Transient | NO | Nucleic Acids |
| | Virus-like | | | | |
| | Particles | | | | |
| | Biological | YES | Transient | NO | Nucleic Acids |
| | liposomes: | | | | |
| | Erythrocyte | | | | |
| | Ghosts and | | | | |
| | Exosomes | | | | |

[0881] In another aspect, the delivery of base editor system components or nucleic acids encoding such components, for example, a polynucleotide programmable nucleotide binding domain (e.g., Cas9) such as, for example, Cas9 or variants thereof, and a gRNA targeting a nucleic acid sequence of interest, may be accomplished by delivering the ribonucleoprotein (RNP) to cells. The RNP comprises a polynucleotide programmable nucleotide binding domain (e.g., Cas9), in complex with the targeting gRNA. RNPs or polynucleotides described herein may be delivered to cells using known methods, such as electroporation, nucleofection, or cationic lipid-mediated methods, for example, as reported by Zuris, J. A. et al., 2015, Nat. Biotechnology, 33(1):73-80, which is incorporated by reference in its entirety. RNPs are advantageous for use in CRISPR base editing systems, particularly for cells that are difficult to transfect, such as primary cells. In addition, RNPs can also alleviate difficulties that may occur with protein expression in cells, especially when eukaryotic promoters, e.g., CMV or EF1A, which may be used in CRISPR plasmids, are not well-expressed. Advantageously, the use of RNPs does not require the delivery of foreign DNA into cells. Moreover, because an RNP comprising a nucleic acid binding protein and gRNA complex is degraded over time, the use of RNPs has the potential to limit off-target effects. In a manner similar to that for plasmid based techniques, RNPs can be used to deliver binding protein (e.g., Cas9 variants) and to direct homology directed repair (HDR).

[0882] Nucleic acid molecules encoding a base editor system can be delivered directly to cells (e.g., motor neuron cells, such as alpha-motor neurons) as naked DNA or RNA by means of transfection or electroporation, for example, or can be conjugated to molecules (e.g., N-acetylgalactosamine) promoting uptake by the target cells. Vectors encoding base editor systems and/or their components can also be used. In particular embodiments, a polynucleotide, e.g. a mRNA encoding a base editor system or a functional component thereof, may be co-electroporated with one or more guide RNAs as described herein.

[0883] Nucleic acid vectors can comprise one or more sequences encoding a domain of a fusion protein or complex described herein. A vector can also encode a protein component of a base editor system operably linked to a nuclear localization signal, nucleolar localization signal, or mitochondrial localization signal. As one example, a vector can include a Cas9 coding sequence that includes one or more nuclear localization sequences (e.g., a nuclear localization sequence from SV40), and one or more deaminases.

[0884] The vector can also include any suitable number of regulatory/control elements, e.g., promoters, enhancers, introns, polyadenylation signals, Kozak consensus sequences, or internal ribosome entry sites (IRES). These elements are well known in the art.

[0885] Vectors according to this disclosure include recombinant viral vectors. Exemplary viral vectors are set forth herein above. Other viral vectors known in the art can also be used. In addition, viral particles can be used to deliver base editor system components in nucleic acid and/or protein form. For example, “empty” viral particles can be assembled to contain a base editor system or component as cargo. Viral vectors and viral particles can also be engineered to incorporate targeting ligands to alter target tissue specificity.

[0886] Vectors described herein may comprise regulatory elements to drive expression of a base editor system or component thereof. Such vectors include adeno-associated viruses with inverted long terminal repeats (AAV ITR). The use of AAV-ITR can be advantageous for eliminating the need for an additional promoter element, which can take up space in the vector. The additional space freed up can be used to drive the expression of additional elements, such as a guide nucleic acid or a selectable marker. ITR activity can be used to reduce potential toxicity due to over expression.

[0887] Any suitable promoter can be used to drive expression of a base editor system or component thereof and, where appropriate, the guide nucleic acid. For ubiquitous expression, promoters include CMV, CBA, CBH, CAG, CBh, PGK, SV40, Ferritin heavy or light chains. For brain or other CNS cell expression, suitable promoters include: SynapsinI for all neurons, CaMKIIalpha for excitatory neurons, GAD67 or GAD65 or VGAT for GABAergic neurons. For neuron (e.g., a motor neuron, such as an alpha-motor neuron) cell expression, suitable promoters include the Albumin promoter. For lung cell expression, suitable promoters include SP-B. For endothelial cells, suitable promoters include ICAM. For hematopoietic cell expression suitable promoters include IFNbeta or CD45. For osteoblast expression suitable promoters can include OG-2.

[0888] In some embodiments, a base editor system of the present disclosure is of small enough size to allow separate promoters to drive expression of the base editor and a compatible guide nucleic acid within the same nucleic acid molecule. For instance, a vector or viral vector can comprise a first promoter operably linked to a nucleic acid encoding the base editor and a second promoter operably linked to the guide nucleic acid.

[0889] The promoter used to drive expression of a guide nucleic acid can include: Pol III promoters, such as U6 or H1 Use of Pol II promoter and intronic cassettes to express gRNA Adeno Associated Virus (AAV).

[0890] In particular embodiments, a fusion protein or complex of the invention is encoded by a polynucleotide present in a viral vector (e.g., adeno-associated virus (AAV), AAV3, AAV3b, AAV4, AAV5, AAV6, AAV7, AAV8, AAV9, AAVrh8, AAV10, AAV-PHP.B and variants thereof), or a suitable capsid protein of any viral vector. Thus, in some aspects, the disclosure relates to the viral delivery of a fusion protein or complex. Examples of viral vectors include retroviral vectors (e.g. Maloney murine leukemia virus, MML-V), adenoviral vectors (e.g. AD100), lentiviral vectors (HIV and FIV-based vectors), herpesvirus vectors (e.g. HSV-2).

[0891] In some aspects, the methods described herein for editing specific genes in a cell can be used to genetically modify the cell (e.g., a motor neuron, such as an alpha-motor neuron).

### Viral Vectors

[0892] A base editor described herein can be delivered with a viral vector. In some embodiments, a base editor disclosed herein can be encoded on a nucleic acid that is contained in a viral vector. In some embodiments, one or more components of the base editor system can be encoded on one or more viral vectors. For example, a base editor and guide nucleic acid can be encoded on a single viral vector. In other embodiments, the base editor and guide nucleic acid are encoded on different viral vectors. In either case, the base editor and guide nucleic acid can each be operably linked to a promoter and terminator. The combination of components encoded on a viral vector can be determined by the cargo size constraints of the chosen viral vector.

[0893] The use of RNA or DNA viral based systems for the delivery of a base editor takes advantage of highly evolved processes for targeting a virus to specific cells in culture or in the host and trafficking the viral payload to the nucleus or host cell genome. Viral vectors can be administered directly to cells in culture, patients (in vivo), or they can be used to treat cells in vitro, and the modified cells can optionally be administered to patients (ex vivo). Conventional viral based systems could include retroviral, lentivirus, adenoviral, adeno-associated and herpes simplex virus vectors for gene transfer. Integration in the host genome is possible with the retrovirus, lentivirus, and adeno-associated virus gene transfer methods, often resulting in long term expression of the inserted transgene. Additionally, high transduction efficiencies have been observed in many different cell types and target tissues.

[0894] Viral vectors can include lentivirus (e.g., HIV and FIV-based vectors), Adenovirus (e.g., AD100), Retrovirus (e.g., Maloney murine leukemia virus, MML-V), herpesvirus vectors (e.g., HSV-2), and Adeno-associated viruses (AAVs), or other plasmid or viral vector types, in particular, using formulations and doses from, for example, U.S. Pat. No. 8,454,972 (formulations, doses for adenovirus), U.S. Pat. No. 8,404,658 (formulations, doses for AAV) and U.S. Pat. No. 5,846,946 (formulations, doses for DNA plasmids) and from clinical trials and publications regarding the clinical trials involving lentivirus, AAV and adenovirus. For example, for AAV, the route of administration, formulation and dose can be as in U.S. Pat. No. 8,454,972 and as in clinical trials involving AAV. For Adenovirus, the route of administration, formulation and dose can be as in U.S. Pat. No. 8,404,658 and as in clinical trials involving adenovirus. For plasmid delivery, the route of administration, formulation and dose can be as in U.S. Pat. No. 5,846,946 and as in clinical studies involving plasmids. Doses can be based on or extrapolated to an average 70 kg individual (e.g. a male adult human), and can be adjusted for patients, subjects, mammals of different weight and species. Frequency of administration is within the ambit of the medical or veterinary practitioner (e.g., physician, veterinarian), depending on usual factors including the age, sex, general health, other conditions of the patient or subject and the particular condition or symptoms being addressed. The viral vectors can be injected into the tissue of interest. For cell-type specific base editing, the expression of the base editor and optional guide nucleic acid can be driven by a cell-type specific promoter.

[0895] The tropism of a retrovirus can be altered by incorporating foreign envelope proteins, expanding the potential target population of target cells. Lentiviral vectors are retroviral vectors that are able to transduce or infect non-dividing cells and typically produce high viral titers. Selection of a retroviral gene transfer system would therefore depend on the target tissue. Retroviral vectors are comprised of cis-acting long terminal repeats with packaging capacity for up to 6-10 kb of foreign sequence. The minimum cis-acting LTRs are sufficient for replication and packaging of the vectors, which are then used to integrate the therapeutic gene into the target cell to provide permanent transgene expression. Widely used retroviral vectors include those based upon murine leukemia virus (MuLV), gibbon ape leukemia virus (GaLV), Simian Immuno deficiency virus (SIV), human immuno deficiency virus (HIV), and combinations thereof (See, e.g., Buchscher et al., J. Virol. 66:2731-2739 (1992); Johann et al., J. Virol. 66:1635-1640 (1992); Sommnerfelt et al., Virol. 176:58-59 (1990); Wilson et al., J. Virol. 63:2374-2378 (1989); Miller et al., J. Virol. 65:2220-2224 (1991); PCT/US94/05700).

[0896] Retroviral vectors, especially lentiviral vectors, can require polynucleotide sequences smaller than a given length for efficient integration into a target cell. For example, retroviral vectors of length greater than 9 kb can result in low viral titers compared with those of smaller size. In some aspects, a base editor of the present disclosure is of sufficient size so as to enable efficient packaging and delivery into a target cell via a retroviral vector. In some embodiments, a base editor is of a size so as to allow efficient packing and delivery even when expressed together with a guide nucleic acid and/or other components of a targetable nuclease system.

[0897] Packaging cells are typically used to form virus particles that are capable of infecting a host cell. Such cells include 293 cells, which package adenovirus, and psi.2 cells or PA317 cells, which package retrovirus. Viral vectors used in gene therapy are usually generated by producing a cell line that packages a nucleic acid vector into a viral particle. The vectors typically contain the minimal viral sequences required for packaging and subsequent integration into a host, other viral sequences being replaced by an expression cassette for the polynucleotide(s) to be expressed. The missing viral functions are typically supplied in trans by the packaging cell line. For example, Adeno-associated virus (“AAV”) vectors used in gene therapy typically only possess ITR sequences from the AAV genome which are required for packaging and integration into the host genome. Viral DNA can be packaged in a cell line, which contains a helper plasmid encoding the other AAV genes, namely rep and cap, but lacking ITR sequences. The cell line can also be infected with adenovirus as a helper. The helper virus can promote replication of the AAV vector and expression of AAV genes from the helper plasmid. The helper plasmid in some cases is not packaged in significant amounts due to a lack of ITR sequences. Contamination with adenovirus can be reduced by, e.g., heat treatment to which adenovirus is more sensitive than AAV.

[0898] In applications where transient expression is preferred, adenoviral based systems can be used. Adenoviral based vectors are capable of very high transduction efficiency in many cell types and do not require cell division. With such vectors, high titer and levels of expression have been obtained. This vector can be produced in large quantities in a relatively simple system. AAV vectors can also be used to transduce cells with target nucleic acids, e.g., in the in vitro production of nucleic acids and peptides, and for in vivo and ex vivo gene therapy procedures (See, e.g., West et al., Virology 160:38-47 (1987); U.S. Pat. No. 4,797,368; WO 93/24641; Kotin, Human Gene Therapy 5:793-801 (1994); Muzyczka, J. Clin. Invest. 94:1351 (1994). The construction of recombinant AAV vectors is described in a number of publications, including U.S. Pat. No. 5,173,414; Tratschin et al., Mol. Cell. Biol. 5:3251-3260 (1985); Tratschin, et al., Mol. Cell. Biol. 4:2072-2081 (1984); Hermonat & Muzyczka, PNAS 81:6466-6470 (1984); and Samulski et al., J. Virol. 63:03822-3828 (1989).

[0899] In some embodiments, AAV vectors are used to transduce a cell of interest with a polynucleotide encoding a base editor or base editor system as provided herein. AAV is a small, single-stranded DNA dependent virus belonging to the parvovirus family. The 4.7 kb wild-type (wt) AAV genome is made up of two genes that encode four replication proteins and three capsid proteins, respectively, and is flanked on either side by 145-bp inverted terminal repeats (ITRs). The virion is composed of three capsid proteins, Vp1, Vp2, and Vp3, produced in a 1:1:10 ratio from the same open reading frame but from differential splicing (Vp1) and alternative translational start sites (Vp2 and Vp3, respectively). Vp3 is the most abundant subunit in the virion and participates in receptor recognition at the cell surface defining the tropism of the virus. A phospholipase domain, which functions in viral infectivity, has been identified in the unique N terminus of Vp1.

[0900] Similar to wt AAV, recombinant AAV (rAAV) utilizes the cis-acting 145-bp ITRs to flank vector transgene cassettes, providing up to 4.5 kb for packaging of foreign DNA. Subsequent to infection, rAAV can express a fusion protein or complex of the invention and persist without integration into the host genome by existing episomally in circular head-to-tail concatemers. Although there are numerous examples of rAAV success using this system, in vitro and in vivo, the limited packaging capacity has limited the use of AAV-mediated gene delivery when the length of the coding sequence of the gene is equal or greater in size than the wt AAV genome.

[0901] Viral vectors can be selected based on the application. For example, for in vivo gene delivery, AAV can be advantageous over other viral vectors. In some embodiments, AAV allows low toxicity, which can be due to the purification method not requiring ultra-centrifugation of cell particles that can activate the immune response. In some embodiments, AAV allows low probability of causing insertional mutagenesis because it doesn't integrate into the host genome. Adenoviruses are commonly used as vaccines because of the strong immunogenic response they induce. Packaging capacity of the viral vectors can limit the size of the base editor that can be packaged into the vector.

[0902] AAV has a packaging capacity of about 4.5 Kb or 4.75 Kb including two 145 base inverted terminal repeats (ITRs). This means disclosed base editor as well as a promoter and transcription terminator can fit into a single viral vector. Constructs larger than 4.5 or 4.75 Kb can lead to significantly reduced virus production. For example, SpCas9 is quite large, the gene itself is over 4.1 Kb, which makes it difficult for packing into AAV. Therefore, embodiments of the present disclosure include utilizing a disclosed base editor which is shorter in length than conventional base editors. In some examples, the base editors are less than 4 kb. Disclosed base editors can be less than 4.5 kb, 4.4 kb, 4.3 kb, 4.2 kb, 4.1 kb, 4 kb, 3.9 kb, 3.8 kb, 3.7 kb, 3.6 kb, 3.5 kb, 3.4 kb, 3.3 kb, 3.2 kb, 3.1 kb, 3 kb, 2.9 kb, 2.8 kb, 2.7 kb, 2.6 kb, 2.5 kb, 2 kb, or 1.5 kb. In some embodiments, the disclosed base editors are 4.5 kb or less in length.

[0903] An AAV can be AAV1, AAV2, AAV5, AAV6 or any combination thereof. One can select the type of AAV with regard to the cells to be targeted; e.g., one can select AAV serotypes 1, 2, 5 or a hybrid capsid AAV1, AAV2, AAV5 or any combination thereof for targeting brain or neuronal cells; and one can select AAV4 for targeting cardiac tissue. AAV8 is useful for delivery to the liver. A tabulation of certain AAV serotypes as to these cells can be found in Grimm, D. et al, J. Virol. 82: 5887-5911 (2008)).

[0904] In some embodiments, lentiviral vectors are used to transduce a cell of interest with a polynucleotide encoding a base editor or base editor system as provided herein. Lentiviruses are complex retroviruses that have the ability to infect and express their genes in both mitotic and post-mitotic cells. The most commonly known lentivirus is the human immunodeficiency virus (HIV), which uses the envelope glycoproteins of other viruses to target a broad range of cell types.

[0905] Lentiviruses can be prepared as follows. After cloning pCasES10 (which contains a lentiviral transfer plasmid backbone), HEK293FT at low passage (p=5) were seeded in a T-75 flask to 50% confluence the day before transfection in DMEM with 10% fetal bovine serum and without antibiotics. After 20 hours, media is changed to OptiMEM (serum-free) media and transfection was done 4 hours later. Cells are transfected with 10 μg of lentiviral transfer plasmid (pCasES10) and the following packaging plasmids: 5 μg of pMD2.G (VSV-g pseudotype), and 7.5 μg of psPAX2 (gag/pol/rev/tat). Transfection can be done in 4 mL OptiMEM with a cationic lipid delivery agent (50 μl Lipofectamine 2000 and 100 μl Plus reagent). After 6 hours, the media is changed to antibiotic-free DMEM with 10% fetal bovine serum. These methods use serum during cell culture, but serum-free methods are preferred.

[0906] Lentivirus can be purified as follows. Viral supernatants are harvested after 48 hours. Supernatants are first cleared of debris and filtered through a 0.45 μm low protein binding (PVDF) filter. They are then spun in an ultracentrifuge for 2 hours at 24,000 rpm. Viral pellets are resuspended in 50 μl of DMEM overnight at 4° C. They are then aliquoted and immediately frozen at −80° C.

[0907] In another embodiment, minimal non-primate lentiviral vectors based on the equine infectious anemia virus (EIAV) are also contemplated. In another embodiment, RetinoStat®, an equine infectious anemia virus-based lentiviral gene therapy vector that expresses angiostatic proteins endostatin and angiostatin that is contemplated to be delivered via a subretinal injection. In another embodiment, use of self-inactivating lentiviral vectors are contemplated.

[0908] Any RNA of the systems, for example a guide RNA or a base editor-encoding mRNA, can be delivered in the form of RNA. Base editor-encoding mRNA can be generated using in vitro transcription. For example, nuclease mRNA can be synthesized using a PCR cassette containing the following elements: T7 promoter, optional kozak sequence (GCCACC), nuclease sequence, and 3′ UTR such as a 3′ UTR from beta globin-polyA tail. The cassette can be used for transcription by T7 polymerase. Guide polynucleotides (e.g., gRNA) can also be transcribed using in vitro transcription from a cassette containing a T7 promoter, followed by the sequence “GG”, and guide polynucleotide sequence.

[0909] To enhance expression and reduce possible toxicity, the base editor-coding sequence and/or the guide nucleic acid can be modified to include one or more modified nucleoside e.g. using pseudo-U or 5-Methyl-C.

[0910] The small packaging capacity of AAV vectors makes the delivery of a number of genes that exceed this size and/or the use of large physiological regulatory elements challenging. These challenges can be addressed, for example, by dividing the protein(s) to be delivered into two or more fragments, wherein the N-terminal fragment is fused to a split intein-N and the C-terminal fragment is fused to a split intein-C. These fragments are then packaged into two or more AAV vectors. As used herein, “intein” refers to a self-splicing protein intron (e.g., peptide) that ligates flanking N-terminal and C-terminal exteins (e.g., fragments to be joined). The use of certain inteins for joining heterologous protein fragments is described, for example, in Wood et al., J. Biol. Chem. 289(21); 14512-9 (2014). For example, when fused to separate protein fragments, the inteins IntN and IntC recognize each other, splice themselves out and simultaneously ligate the flanking N- and C-terminal exteins of the protein fragments to which they were fused, thereby reconstituting a full-length protein from the two protein fragments. Other suitable inteins will be apparent to a person of skill in the art.

[0911] A fragment (e.g., a functional fragment) of a fusion protein or complex of the invention can vary in length. In some embodiments, a protein fragment (e.g., a functional fragment) ranges from 2 amino acids to about 1000 amino acids in length. In some embodiments, a protein fragment (e.g., a functional fragment) ranges from about 5 amino acids to about 500 amino acids in length. In some embodiments, a protein fragment (e.g., a functional fragment) ranges from about 20 amino acids to about 200 amino acids in length. In some embodiments, a protein fragment (e.g., a functional fragment) ranges from about 10 amino acids to about 100 amino acids in length. Suitable protein fragments (e.g., functional fragments) of other lengths will be apparent to a person of skill in the art.

[0912] In one embodiment, dual AAV vectors are generated by splitting a large transgene expression cassette in two separate halves (5′ and 3′ ends, or head and tail), where each half of the cassette is packaged in a single AAV vector (of <5 kb). The re-assembly of the full-length transgene expression cassette is then achieved upon co-infection of the same cell by both dual AAV vectors followed by: (1) homologous recombination (HR) between 5′ and 3′ genomes (dual AAV overlapping vectors); (2) ITR-mediated tail-to-head concatemerization of 5′ and 3′ genomes (dual AAV trans-splicing vectors); or (3) a combination of these two mechanisms (dual AAV hybrid vectors). The use of dual AAV vectors in vivo results in the expression of full-length proteins. The use of the dual AAV vector platform represents an efficient and viable gene transfer strategy for transgenes of >4.7 kb in size.

### Inteins

[0913] Inteins (intervening protein) are auto-processing domains found in a variety of diverse organisms, which carry out a process known as protein splicing. Protein splicing is a multi-step biochemical reaction comprised of both the cleavage and formation of peptide bonds. While the endogenous substrates of protein splicing are proteins found in intein-containing organisms, inteins can also be used to chemically manipulate virtually any polypeptide backbone.

[0914] In protein splicing, the intein excises itself out of a precursor polypeptide by cleaving two peptide bonds, thereby ligating the flanking extein (external protein) sequences via the formation of a new peptide bond. This rearrangement occurs post-translationally (or possibly co-translationally). Intein-mediated protein splicing occurs spontaneously, requiring only the folding of the intein domain.

[0915] About 5% of inteins are split inteins, which are transcribed and translated as two separate polypeptides, the N-intein and C-intein, each fused to one extein. Upon translation, the intein fragments spontaneously and non-covalently assemble into the canonical intein structure to carry out protein splicing in trans. The mechanism of protein splicing entails a series of acyl-transfer reactions that result in the cleavage of two peptide bonds at the intein-extein junctions and the formation of a new peptide bond between the N- and C-exteins. This process is initiated by activation of the peptide bond joining the N-extein and the N-terminus of the intein. Virtually all inteins have a cysteine or serine at their N-terminus that attacks the carbonyl carbon of the C-terminal N-extein residue. This N to O/S acyl-shift is facilitated by a conserved threonine and histidine (referred to as the TXXH motif), along with a commonly found aspartate, which results in the formation of a linear (thio)ester intermediate. Next, this intermediate is subject to trans-(thio)esterification by nucleophilic attack of the first C-extein residue (+1), which is a cysteine, serine, or threonine. The resulting branched (thio)ester intermediate is resolved through a unique transformation: cyclization of the highly conserved C-terminal asparagine of the intein. This process is facilitated by the histidine (found in a highly conserved HNF motif) and the penultimate histidine and may also involve the aspartate. This succinimide formation reaction excises the intein from the reactive complex and leaves behind the exteins attached through a non-peptidic linkage. This structure rapidly rearranges into a stable peptide bond in an intein-independent fashion. In some embodiments, the split intein is selected from Gp41.1, IMPDH.1, NrdJ.1 and Gp41.8 (Carvajal-Vallejos, Patricia et al. “Unprecedented rates and efficiencies revealed for new natural split inteins from metagenomic sources.” J. Biol. Chem., vol. 287, 34 (2012)).

[0916] Non-limiting examples of inteins include any intein or intein-pair known in the art, which include a synthetic intein based on the dnaE intein, the Cfa-N(e.g., split intein-N) and Cfa-C (e.g., split intein-C) intein pair, has been described (e.g., in Stevens et al., J Am Chem Soc. 2016 Feb. 24; 138(7):2162-5, incorporated herein by reference), and DnaE. Non-limitine examples of pairs of inteins that may be used in accordance with the present disclosure include: Cfa DnaE intein, Ssp GyrB intein, Ssp DnaX intein, Ter DnaE3 intein, Ter ThyX intein, Rma DnaB intein and Cne Prp8 intein (e.g., as described in U.S. Pat. No. 8,394,604, incorporated herein by reference). Exemplary nucleotide and amino acid sequences of inteins are provided in the Sequence Listing at SEQ TD NOs: 370-377.

[0917] Inteins suitable for use in embodiments of the present disclosure and methods for use thereof are described in U.S. Pat. No. 10,526,401, International Patent Application Publication No. WO 2013/045632, and in U.S. Patent Application Publication No. US 2020/0055900, the full disclosures of which are incorporated herein by reference in their entireties by reference for all purposes.

[0918] Further non-limiting examples of amino acid and nucleotide sequences for N-inteins and C-inteins suitable for use as intein pairs include those with at least 8500 sequence identity to an amino acid or nucleotide sequence listed in the following Tables 20A-20C, or a fragments thereof that function as part of a split intein pair.

TABLE 20A
Exemplary amino acid and nucleotide sequences for N-Inteins.

| | | SEQ ID |
|---|---|---|
| N-Intein | Amino Acid or Nucleotide Sequence | NO |
| Cfa(GEP) | TGCCTGAGCTACGATACCGAGATCCTGACCGTGGAATACGGCTT | 389 |
| (nucleotide | CCTGCCTATCGGCAAGATCGTCGAGGAACGGATCGAGTGCACAG | |
| sequence) | TGTACACCGTGGATAAGAATGGCTTCGTGTACACCCAGCCTATC | |
| | GCTCAGTGGCACAACAGAGGCGAGCAAGAGGTGTTCGAGTACTG | |
| | CCTGGAAGATGGCAGCATCATCCGGGCCACCAAGGACCACAAGT | |
| | TTATGACCACCGACGGCCAGATGCTGCCCATCGACGAGATCTTT | |
| | GAGAGAGGCCTGGACCTGAAACAGGTGGACGGACTGCCT | |
| Cfa(GEP) | CLSYDTEILTVEYGFLPIGKIVEERIECTVYTVDKNGFVYTQPI | 390 |
| (amino acid | AQWHNRGEQEVFEYCLEDGSIIRATKDHKFMTTDGQMLPIDEIF | |
| sequence) | ERGLDLKQVDGLP | |
| Gp41.1 | TGTCTGGACCTCAAGACCCAAGTGCAGACACCTCAGGGCATGAA | 391 |
| (nucleotide | AGAGATTAGCAATATCCAGGTGGGCGACCTGGTCCTGAGCAACA | |
| sequence) | CCGGCTACAACGAGGTGCTGAACGTGTTCCCTAAGTCCAAGAAG | |
| | AAATCTTATAAGATCACCCTGGAAGATGGCAAGGAAATCATCTG | |
| | CAGCGAGGAACACCTGTTCCCCACCCAGACCGGCGAGATGAACA | |
| | TCAGCGGCGGACTGAAGGAGGGCATGTGCCTGTACGTGAAGGAG | |
| Gp41.1 (amino | CLDLKTQVQTPQGMKEISNIQVGDLVLSNTGYNEVLNVFPKSKK | 392 |
| acid sequence) | KSYKITLEDGKEIICSEEHLFPTQTGEMNISGGLKEGMCLYVKE | |
| Gp41.8 | TGCCTGAGCCTGGACACCATGGTGGTGACAAACGGCAAGGCCAT | 393 |
| (nucleotide | CGAGATCAGAGATGTGAAGGTGGGAGATTGGCTGGAAAGCGAAT | |
| sequence) | GTGGCCCAGTGCAGGTTACAGAGGTGCTGCCTATCATCAAGCAG | |
| | CCTGTCTTTGAGATTGTGCTGAAAAGCGGAAAAAAGATCCGGGT | |
| | GTCCGCTAATCACAAGTTCCCCACCAAGGACGGCCTCAAGACCA | |
| | TCAACAGCGGCCTGAAGGTGGGCGACTTCCTGAGAAGCAGAGCC | |
| | AAG | |
| Gp41.8 (amino | CLSLDTMVVTNGKAIEIRDVKVGDWLESECGPVQVTEVLPIIKQ | 394 |
| acid sequence) | PVFEIVLKSGKKIRVSANHKFPTKDGLKTINSGLKVGDFLRSRA | |
| | K | |
| IMPDH.1 | TGTTTTGTGCCTGGCACCCTGGTGAACACAGAGAATGGCCTGAA | 395 |
| (nucleotide | GAAAATCGAGGAAATCAAGGTGGGCGACAAGGTGTTCAGCCATA | |
| sequence) | CAGGCAAGCTGCAGGAGGTGGTGGACACCCTGATCTTCGACCGG | |
| | GACGAGGAAATCATCTCTATCAACGGCATTGATTGCACCAAGAA | |
| | CCACGAGTTCTACGTGATCGATAAGGAAAACGCTAATAGAGTGA | |
| | ACGAGGACAACATCCACCTCTTCGCCAGATGGGTCCACGCCGAG | |
| | GAACTGGATATGAAAAAGCACCTGCTGATCGAGCTGGAA | |
| IMPDH. 1 | CFVPGTLVNTENGLKKIEEIKVGDKVFSHTGKLQEVVDTLIFDR | 396 |
| (amino acid | DEEIISINGIDCTKNHEFYVIDKENANRVNEDNIHLFARWVHAE | |
| sequence) | ELDMKKHLLIELE | |
| NrdJ.1 | TGCCTGGTGGGCTCTAGCGAGATTATCACAAGAAACTACGGCAA | 397 |
| (nucleotide | GACCACCATCAAGGAAGTGGTCGAGATCTTCGACAACGACAAGA | |
| sequence) | ATATCCAGGTGCTGGCCTTCAACACCCACACCGATAATATCGAG | |
| | TGGGCCCCTATCAAGGCCGCTCAGCTGACCAGACCTAACGCCGA | |
| | GCTGGTTGAACTGGAAATCGACACCCTGCACGGCGTGAAAACAA | |
| | TCCGGTGCACCCCTGACCACCCCGTGTACACCAAGAACAGAGGC | |
| | TACGTGCGGGCCGACGAGCTGACAGATGATGACGAGCTCGTGGT | |
| | GGCTATC | |
| NrdJ.1 (amino | CLVGSSEIITRNYGKTTIKEVVEIFDNDKNIQVLAFNTHTDNIE | 398 |
| acid sequence) | WAPIKAAQLTRPNAELVELEIDTLHGVKTIRCTPDHPVYTKNRG | |
| | YVRADELTDDDELVVAI | |
| Npu | TGCCTGAGCTACGAGACAGAGATCCTGACCGTGGAATATGGCCT | 399 |
| (nucleotide | GCTGCCAATCGGAAAGATCGTGGAAAAGCGGATCGAGTGCACCG | |
| sequence) | TCTACAGCGTGGACAACAACGGAAATATCTATACACAGCCTGTG | |
| | GCCCAATGGCACGACCGGGGCGAACAGGAGGTGTTTGAGTACTG | |
| | CCTGGAAGATGGTTCTCTGATTAGAGCCACCAAGGACCACAAGT | |
| | TCATGACCGTCGACGGCCAGATGCTGCCCATCGACGAAATCTTC | |
| | GAGCGGGAACTCGACCTGATGAGAGTGGATAACCTGCCCAAT | |
| Npu (amino | CLSYETEILTVEYGLLPIGKIVEKRIECTVYSVDNNGNIYTQPV | 400 |
| acid sequence) | AQWHDRGEQEVFEYCLEDGSLIRATKDHKFMTVDGQMLPIDEIF | |
| | ERELDLMRVDNLPN | |
| Cfa N-intein | CLSYDTEILTVEYGFLPIGKIVEERIECTVYTVDKNGFVYTQPI | 401 |
| | AQWHNRGEQEVFEYCLEDGSIIRATKDHKFMTTDGQMLPIDEIF | |
| | ERGLDLKQVDGLP | |
| Npu N-intein | CLSYETEILTVEYGLLPIGKIVEKRIECTVYSVDNNGNIYTQPV | 402 |
| | AQWHDRGEQEVFEYCLEDGSLIRATKDHKFMTVDGQMLPIDEIF | |
| | ERELDLMRVDNLPN | |

TABLE 20B
Further exemplary amino acid and nucleotide sequences for N-Inteins.

| | | SEQ |
|---|---|---|
| N-Intein-SC | Amino Acid or Nucleotide Sequence | ID NO |
| Gp41.1 | ACAAGAAGCGGATACTGTCTGGACCTCAAGACCCAAGTGCAGACA | 403 |
| (nucleotide | CCTCAGGGCATGAAAGAGATTAGCAATATCCAGGTGGGCGACCTG | |
| sequence) | GTCCTGAGCAACACCGGCTACAACGAGGTGCTGAACGTGTTCCCT | |
| | AAGTCCAAGAAGAAATCTTATAAGATCACCCTGGAAGATGGCAAG | |
| | GAAATCATCTGCAGCGAGGAACACCTGTTCCCCACCCAGACCGGC | |
| | GAGATGAACATCAGCGGCGGACTGAAGGAGGGCATGTGCCTGTAC | |
| | GTGAAGGAG | |
| Gp41.1 | TRSGYCLDLKTQVQTPQGMKEISNIQVGDLVLSNTGYNEVLNVFP | 404 |
| (amino acid | KSKKKSYKITLEDGKEIICSEEHLFPTQTGEMNISGGLKEGMCLY | |
| sequence) | VKE | |
| Gp41.8 | TCTCAGCTGAACCGGTGCCTGAGCCTGGACACCATGGTGGTGACA | 405 |
| (nucleotide | AACGGCAAGGCCATCGAGATCAGAGATGTGAAGGTGGGAGATTGG | |
| sequence) | CTGGAAAGCGAATGTGGCCCAGTGCAGGTTACAGAGGTGCTGCCT | |
| | ATCATCAAGCAGCCTGTCTTTGAGATTGTGCTGAAAAGCGGAAAA | |
| | AAGATCCGGGTGTCCGCTAATCACAAGTTCCCCACCAAGGACGGC | |
| | CTCAAGACCATCAACAGCGGCCTGAAGGTGGGCGACTTCCTGAGA | |
| | AGCAGAGCCAAG | |
| Gp41.8 | SQLNRCLSLDTMVVTNGKAIEIRDVKVGDWLESECGPVQVTEVLP | 406 |
| (amino acid | IIKQPVFEIVLKSGKKIRVSANHKFPTKDGLKTINSGLKVGDFLR | |
| sequence) | SRAK | |
| IMPDH.1 | GGCATCGGCGGAGGATGTTTTGTGCCTGGCACCCTGGTGAACACA | 407 |
| (nucleotide | GAGAATGGCCTGAAGAAAATCGAGGAAATCAAGGTGGGCGACAAG | |
| sequence) | GTGTTCAGCCATACAGGCAAGCTGCAGGAGGTGGTGGACACCCTG | |
| | ATCTTCGACCGGGACGAGGAAATCATCTCTATCAACGGCATTGAT | |
| | TGCACCAAGAACCACGAGTTCTACGTGATCGATAAGGAAAACGCT | |
| | AATAGAGTGAACGAGGACAACATCCACCTCTTCGCCAGATGGGTC | |
| | CACGCCGAGGAACTGGATATGAAAAAGCACCTGCTGATCGAGCTG | |
| | GAA | |
| IMPDH.1 | GIGGGCFVPGTLVNTENGLKKIEEIKVGDKVFSHTGKLQEVVDTL | 408 |
| (amino acid | IFDRDEEIISINGIDCTKNHEFYVIDKENANRVNEDNIHLFARWV | |
| sequence) | HAEELDMKKHLLIELE | |
| NrdJ.1 | GGAACAAACCCATGTTGCCTGGTGGGCTCTAGCGAGATTATCACA | 409 |
| (nucleotide | AGAAACTACGGCAAGACCACCATCAAGGAAGTGGTCGAGATCTTC | |
| sequence) | GACAACGACAAGAATATCCAGGTGCTGGCCTTCAACACCCACACC | |
| | GATAATATCGAGTGGGCCCCTATCAAGGCCGCTCAGCTGACCAGA | |
| | CCTAACGCCGAGCTGGTTGAACTGGAAATCGACACCCTGCACGGC | |
| | GTGAAAACAATCCGGTGCACCCCTGACCACCCCGTGTACACCAAG | |
| | AACAGAGGCTACGTGCGGGCCGACGAGCTGACAGATGATGACGAG | |
| | CTCGTGGTGGCTATC | |
| NrdJ.1 (amino | GTNPCCLVGSSEIITRNYGKTTIKEVVEIFDNDKNIQVLAFNTHT | 410 |
| acid | DNIEWAPIKAAQLTRPNAELVELEIDTLHGVKTIRCTPDHPVYTK | |
| sequence) | NRGYVRADELTDDDELVVAI | |

TABLE 20C
Exemplary amino acid and nucleotide sequences for C-Inteins.

| | | SEQ ID |
|---|---|---|
| C-Intein | Amino Acid or Nucleotide Sequence | NO |
| Cfa(GEP) | GTCAAGATCATCAGCAGAAAGAGCCTGGGCACCCAGAACGTGTA | 411 |
| (nucleotide | CGATATCGGAGTGGGCGAGCCCCACAACTTTCTGCTCAAGAATG | |
| sequence) | GCCTGGTGGCCAGCAAC | |
| Cfa(GEP) | VKIISRKSLGTQNVYDIGVGEPHNFLLKNGLVASN | 412 |
| (amino acid | | |
| sequence) | | |
| Gp41.1 | ATGATGCTGAAAAAGATCCTGAAGATCGAGGAACTGGATGAGAG | 413 |
| (nucleotide | AGAGCTGATCGACATCGAAGTGTCTGGCAATCACCTGTTCTACG | |
| sequence) | CCAACGACATCCTGACCCACAACAGC | |
| Gp41.1 (amino | MMLKKILKIEELDERELIDIEVSGNHLFYANDILTHNS | 414 |
| acid sequence) | | |
| Gp41.8 | ATGTGCGAAATCTTCGAGAACGAGATTGATTGGGACGAAATCGC | 415 |
| (nucleotide | CTCTATCGAGTACGTGGGCGTGGAAGAGACAATCGACATCAACG | |
| sequence) | TGACCAACGACAGACTGTTTTTCGCCAATGGCATCCTGACCCAC | |
| | AACAGC | |
| Gp41.8 (amino | MCEIFENEIDWDEIASIEYVGVEETIDINVTNDRLFFANGILTH | 416 |
| acid sequence) | NS | |
| IMPDH.1 | ATGAAATTCAAGCTGAAGGAAATCACCAGCATCGAGACAAAGCA | 417 |
| (nucleotide | CTACAAGGGCAAGGTGCACGATCTGACCGTGAACCAGGACCACA | |
| sequence) | GCTACAACGTCAGAGGCACCGTGGTGCATAATTCT | |
| IMPDH.1 | MKFKLKEITSIETKHYKGKVHDLTVNQDHSYNVRGTVVHNS | 418 |
| (amino acid | | |
| sequence) | | |
| NrdJ.1 | ATGGAAGCCAAGACCTACATCGGCAAGCTGAAATCTAGAAAGAT | 419 |
| (nucleotide | CGTGTCCAACGAGGATACATACGACATCCAGACCAGCACCCACA | |
| sequence) | ATTTCTTCGCCAACGACATCCTGGTGCACAACAGC | |
| NrdJ.1 (amino | MEAKTYIGKLKSRKIVSNEDTYDIQTSTHNFFANDILVHNS | 420 |
| acid sequence) | | |
| Npu | ATGATCAAGATCGCCACAAGAAAGTACCTGGGCAAGCAGAACGT | 421 |
| (nucleotide | GTACGACATCGGCGTGGAGAGAGACCACAACTTCGCCCTGAAGA | |
| sequence) | ACGGCTTTATCGCCTCTAAT | |
| Npu (amino | MIKIATRKYLGKQNVYDIGVERDHNFALKNGFIASN | 422 |
| acid sequence) | | |
| Cfa C-intein | MVKIISRKSLGTQNVYDIGVGEPHNFLLKNGLVASN | 423 |
| (amino acid | | |
| sequence) | | |
| Npu C-intein | IKIATRKYLGKQNVYDIGVERDHNFALKNGFIASN | 424 |
| (amino acid | | |
| sequence) | | |

[0919] Intein-N and intein-C may be fused to the N-terminal portion of a split Cas9 and the C-terminal portion of the split Cas9, respectively, for the joining of the N-terminal portion of the split Cas9 and the C-terminal portion of the split Cas9. For example, in some embodiments, an intein-N is fused to the C-terminus of the N-terminal portion of the split Cas9, i.e., to form a structure of N—[N-terminal portion of the split Cas9]-[intein-N]--C. In some embodiments, an intein-C is fused to the N-terminus of the C-terminal portion of the split Cas9, i.e., to form a structure of N-[intein-C]--[C-terminal portion of the split Cas9]-C. In embodiments, a base editor is encoded by two polynucleotides, where one polynucleotide encodes a fragment of the base editor fused to an intein-N and another polynucleotide encodes a fragment of the base editor fused to an intein-C. The mechanism of intein-mediated protein splicing for joining the proteins the inteins are fused to (e.g., split Cas9) is known in the art, e.g., as described in Shah et al., Chem Sci. 2014; 5(1):446-461, incorporated herein by reference. Methods for designing and using inteins are known in the art and described, for example by WO2014004336, WO2017132580, WO2013045632A1, US20150344549, and US20180127780, each of which is incorporated herein by reference in their entirety.

[0920] In some embodiments, a portion or fragment of a nuclease (e.g., Cas9) is fused to an intein. The nuclease can be fused to the N-terminus or the C-terminus of the intein. In some embodiments, a portion or fragment of a fusion protein or complex is fused to an intein and fused to an AAV capsid protein. The intein, nuclease and capsid protein can be fused together in any arrangement (e.g., nuclease-intein-capsid, intein-nuclease-capsid, capsid-intein-nuclease, etc.). In some embodiments, an N-terminal fragment of a base editor (e.g., ABE, CBE) is fused to a split intein-N and a C-terminal fragment is fused to a split intein-C. In some embodiments, an N-terminal fragment of a base editor (e.g., ABE, CBE) is fused to a split intein-N and a C-terminal fragment is fused to a split intein-C. In some embodiments, an N-terminal fragment of a nucleic acid programmable DNA binding protein (napDNAbp) domain (e.g., Cas9) is fused to a split intein-N and a C-terminal fragment is fused to a split intein-C. In some embodiments, an N-terminal fragment of a deaminase domain (e.g., adenosine or cytidine deaminase) fused to a split intein-N and a C-terminal fragment is fused to a split intein-C. In some embodiments, a portion (e.g., a functional portion) or fragment of a nuclease (e.g., Cas9) is fused to an intein. The nuclease can be fused to the N-terminus or the C-terminus of the intein. In some embodiments, a portion (e.g., a functional portion) or fragment of a fusion protein is fused to an intein and fused to an AAV capsid protein. The intein, nuclease and capsid protein can be fused together in any arrangement (e.g., nuclease-intein-capsid, intein-nuclease-capsid, capsid-intein-nuclease, etc.). In some embodiments, an N-terminal fragment of a base editor (e.g., ABE, CBE) is fused to a split intein-N and a C-terminal fragment is fused to a split intein-C. These fragments are then packaged into two or more AAV vectors. In some embodiments, the N-terminus of an intein is fused to the C-terminus of a fusion protein and the C-terminus of the intein is fused to the N-terminus of an AAV capsid protein.

[0921] In one embodiment, inteins are utilized to join fragments or portions of a cytidine or adenosine base editor protein that is grafted onto an AAV capsid protein. The use of certain inteins for joining heterologous protein fragments is described, for example, in Wood et al., J. Biol. Chem. 289(21); 14512-9 (2014). For example, when fused to separate protein fragments, the inteins IntN and IntC recognize each other, splice themselves out and simultaneously ligate the flanking N- and C-terminal exteins of the protein fragments to which they were fused, thereby reconstituting a full-length protein from the two protein fragments. Other suitable inteins will be apparent to a person of skill in the art.

[0922] In some embodiments, an ABE was split into N- and C-terminal fragments at Ala, Ser, Thr, or Cys residues within selected regions of SpCas9. These regions correspond to loop regions identified by Cas9 crystal structure analysis.

[0923] The N-terminus of each fragment is fused to an intein-N and the C-terminus of each fragment is fused to an intein C at amino acid positions S303, T310, T313, S355, A456, S460, A463, T466, S469, T472, T474, C574, S577, A589, and S590, which are indicated in capital letters in the sequence below (called the “Cas9 reference sequence”).

| (SEQ ID NO: 197) | |
|---|---|
| 1 | mdkkysigld igtnsvgwav itdeykvpsk kfkvlgntdr hsikknliga llfdsgetae |
| 61 | atrlkrtarr rytrrknric ylqeifsnem akvddsffhr leesflveed kkherhpifg |
| 121 | nivdevayhe kyptiyhlrk klvdstdkad lrliylalah mikfrghfli egdlnpdnsd |
| 181 | vdklfiqlvq tynqlfeenp inasgvdaka ilsarlsksr rlenliaqlp gekknglfgn |
| 241 | lialslgltp nfksnfdlae daklqlskdt yddddnlla qigdqyadlf laaknlsdai |
| 301 | llSdilrvnT eiTkaplsas mikrydehhq dltllkalvr qqlpekykei ffdqSkngya |
| 361 | gyidggasqe efykfikpil ekmdgteell vklnredllr kqrtfdngsi phqihlgelh |
| 421 | ailrrqedfy pflkdnreki ekiltfripy yvgplArgnS rfAwmTrkSe eTiTpwnfee |
| 481 | vvdkgasaqs fiermtnfdk nlpnekvlpk hsllyeyftv yneltkvkyv tegmrkpafl |
| 541 | sgeqkkaivd llfktnrkvt vkqlkedyfk kieCfdSvei sgvedrfnAS lgtyhdllki |
| 601 | ikdkdfldne enedilediv ltltlfedre mieerlktya hlfddkvmkq lkrrrytgwg |
| 661 | rlsrklingi rdkqsgktil dflksdgfan rnfmqlihdd sltfkediqk aqvsgqgdsl |
| 721 | hehianlags paikkgilqt vkvvdelvkv mgrhkpeniv iemarenqtt qkgqknsrer |
| 781 | mkrieegike lgsqilkehp ventqlqnek lylyylqngr dmyvdqeldi nrlsdydvdh |
| 841 | ivpqsflkdd sidnkvltrs dknrgksdnv pseevvkkmk nywrqllnak litqrkfdnl |
| 901 | tkaergglse ldkagfikrq lvetrqitkh vaqildsrmn tkydendkli revkvitlks |
| 961 | klvsdfrkdf qfykvreinn yhhahdayln avvgtalikk ypklesefvy gdykvydvrk |
| 1021 | miakseqeig katakyffys nimnffktei tlangeirkr plietngetg eivwdkgrdf |
| 1081 | atvrkvlsmp qvnivkktev qtggfskesi lpkrnsdkli arkkdwdpkk yggfdsptva |
| 1141 | ysvlvvakve kgkskklksv kellgitime rssfeknpid fleakgykev kkdliiklpk |
| 1201 | yslfelengr krmlasagel qkgnelalps kyvnflylas hyeklkgspe dneqkqlfve |
| 1261 | qhkhyldeii eqisefskrv iladanldkv lsaynkhrdk pireqaenii hlftltnlga |
| 1321 | paafkyfdtt idrkrytstk evldatlihq sitglyetri dlsqlggd |

### Pharmaceutical Compositions

[0924] In some aspects, the present invention provides a pharmaceutical composition comprising any of the cells, polynucleotides, vectors, base editors, base editor systems, guide polynucleotides, fusion proteins, complexes, or the fusion protein-guide polynucleotide complexes described herein

[0925] The pharmaceutical compositions of the present invention can be prepared in accordance with known techniques. See, e.g., Remington, The Science And Practice of Pharmacy (21st ed. 2005). In general, the cell, or population thereof is admixed with a suitable carrier prior to administration or storage, and in some embodiments, the pharmaceutical composition further comprises a pharmaceutically acceptable carrier. Suitable pharmaceutically acceptable carriers generally comprise inert substances that aid in administering the pharmaceutical composition to a subject, aid in processing the pharmaceutical compositions into deliverable preparations, or aid in storing the pharmaceutical composition prior to administration. Pharmaceutically acceptable carriers can include agents that can stabilize, optimize or otherwise alter the form, consistency, viscosity, pH, pharmacokinetics, solubility of the formulation. Such agents include buffering agents, wetting agents, emulsifying agents, diluents, encapsulating agents, and skin penetration enhancers. For example, carriers can include, but are not limited to, saline, buffered saline, dextrose, arginine, sucrose, water, glycerol, ethanol, sorbitol, dextran, sodium carboxymethyl cellulose, and combinations thereof.

[0926] Some nonlimiting examples of materials which can serve as pharmaceutically-acceptable carriers include: (1) sugars, such as lactose, glucose and sucrose; (2) starches, such as corn starch and potato starch; (3) cellulose, and its derivatives, such as sodium carboxymethyl cellulose, methylcellulose, ethyl cellulose, microcrystalline cellulose and cellulose acetate; (4) powdered tragacanth; (5) malt; (6) gelatin; (7) lubricating agents, such as magnesium stearate, sodium lauryl sulfate and talc; (8) excipients, such as cocoa butter and suppository waxes; (9) oils, such as peanut oil, cottonseed oil, safflower oil, sesame oil, olive oil, corn oil and soybean oil; (10) glycols, such as propylene glycol; (11) polyols, such as glycerin, sorbitol, mannitol and polyethylene glycol (PEG); (12) esters, such as ethyl oleate and ethyl laurate; (13) agar; (14) buffering agents, such as magnesium hydroxide and aluminum hydroxide; (15) alginic acid; (16) pyrogen-free water; (17) isotonic saline; (18) Ringer's solution; (19) ethyl alcohol; (20) pH buffered solutions; (21) polyesters, polycarbonates and/or polyanhydrides; (22) bulking agents, such as polypeptides and amino acids (23) serum alcohols, such as ethanol; and (23) other non-toxic compatible substances employed in pharmaceutical formulations. Wetting agents, coloring agents, release agents, coating agents, sweetening agents, flavoring agents, perfuming agents, preservative and antioxidants can also be present in the formulation.

[0927] Pharmaceutical compositions can comprise one or more pH buffering compounds to maintain the pH of the formulation at a predetermined level that reflects physiological pH, such as in the range of about 5.0 to about 8.0. The pH buffering compound used in the aqueous liquid formulation can be an amino acid or mixture of amino acids, such as histidine or a mixture of amino acids such as histidine and glycine. Alternatively, the pH buffering compound is preferably an agent which maintains the pH of the formulation at a predetermined level, such as in the range of about 5.0 to about 8.0, and which does not chelate calcium ions. Illustrative examples of such pH buffering compounds include, but are not limited to, imidazole and acetate ions. The pH buffering compound may be present in any amount suitable to maintain the pH of the formulation at a predetermined level.

[0928] Pharmaceutical compositions can also contain one or more osmotic modulating agents, i.e., a compound that modulates the osmotic properties (e.g., tonicity, osmolality, and/or osmotic pressure) of the formulation to a level that is acceptable to the blood stream and blood cells of recipient individuals. The osmotic modulating agent can be an agent that does not chelate calcium ions. The osmotic modulating agent can be any compound known or available to those skilled in the art that modulates the osmotic properties of the formulation. One skilled in the art may empirically determine the suitability of a given osmotic modulating agent for use in the inventive formulation. Illustrative examples of suitable types of osmotic modulating agents include, but are not limited to: salts, such as sodium chloride and sodium acetate; sugars, such as sucrose, dextrose, and mannitol; amino acids, such as glycine; and mixtures of one or more of these agents and/or types of agents. The osmotic modulating agent(s) may be present in any concentration sufficient to modulate the osmotic properties of the formulation.

[0929] In addition to a modified cell, or population thereof, and a carrier, the pharmaceutical compositions of the present invention can include at least one additional therapeutic agent useful in the treatment of disease. For example, some embodiments of the pharmaceutical composition described herein further comprises a chemotherapeutic agent. In some embodiments, the pharmaceutical composition further comprises a cytokine peptide or a nucleic acid sequence encoding a cytokine peptide. In some embodiments, the pharmaceutical compositions comprising the cell or population thereof can be administered separately from an additional therapeutic agent.

[0930] Of course, for any composition to be administered to an animal or human, and for any particular method of administration, it is preferred to determine therefore: toxicity, such as by determining the lethal dose (LD) and LD50 in a suitable animal model (e.g., a rodent such as a mouse); and, the dosage of the composition(s), concentration of components therein, and the timing of administering the composition(s), which elicit a suitable response. Such determinations do not require undue experimentation from the knowledge of the skilled artisan, this disclosure and the documents cited herein. And, the time for sequential administrations can be ascertained without undue experimentation.

[0931] In some embodiments, the pharmaceutical composition is formulated for delivery to a subject. Suitable routes of administrating the pharmaceutical composition described herein include, without limitation: topical, subcutaneous, transdermal, intradermal, intralesional, intraarticular, intraperitoneal, intravesical, transmucosal, gingival, intradental, intracochlear, transtympanic, intraorgan, epidural, intrathecal, intramuscular, intravenous, intravascular, intraosseus, periocular, intratumoral, intracerebral, and intracerebroventricular administration.

[0932] In some embodiments, the pharmaceutical composition described herein is administered locally to a diseased site (e.g., skeletal muscle, the central nervous system, the brain, and/or a neuron, such as an alpha-motor neuron). In some embodiments, the pharmaceutical composition described herein is administered to a subject by injection, by means of a catheter, by means of a suppository, or by means of an implant, the implant being of a porous, non-porous, or gelatinous material, including a membrane, such as a sialastic membrane, or a fiber.

[0933] In other embodiments, the pharmaceutical composition described herein is delivered in a controlled release system. In one embodiment, a pump can be used (see, e.g., Langer, 1990, Science 249: 1527-1533; Sefton, 1989, CRC Crit. Ref. Biomed. Eng. 14:201; Buchwald et al., 1980, Surgery 88:507; Saudek et al., 1989, N. Engl. J. Med. 321:574). In another embodiment, polymeric materials can be used. (See, e.g., Medical Applications of Controlled Release (Langer and Wise eds., CRC Press, Boca Raton, Fla., 1974); Controlled Drug Bioavailability, Drug Product Design and Performance (Smolen and Ball eds., Wiley, New York, 1984); Ranger and Peppas, 1983, Macromol. Sci. Rev. Macromol. Chem. 23:61. See also Levy et al., 1985, Science 228: 190; During et al., 1989, Ann. Neurol. 25:351; Howard et al., 1989, J. Neurosurg. 71: 105.) Other controlled release systems are discussed, for example, in Langer, supra.

[0934] In some embodiments, the pharmaceutical composition is formulated in accordance with routine procedures as a composition adapted for intravenous or subcutaneous administration to a subject, e.g., a human. In some embodiments, pharmaceutical composition for administration by injection are solutions in sterile isotonic use as solubilizing agent and a local anesthetic such as lignocaine to ease pain at the site of the injection. Generally, the ingredients are supplied either separately or mixed together in unit dosage form, for example, as a dry lyophilized powder or water free concentrate in a hermetically sealed container such as an ampoule or sachette indicating the quantity of active agent. Where the pharmaceutical is to be administered by infusion, it can be dispensed with an infusion bottle containing sterile pharmaceutical grade water or saline. Where the pharmaceutical composition is administered by injection, an ampoule of sterile water for injection or saline can be provided so that the ingredients can be mixed prior to administration.

[0935] A pharmaceutical composition for systemic administration can be a liquid, e.g., sterile saline, lactated Ringer's or Hank's solution. In addition, the pharmaceutical composition can be in solid forms and re-dissolved or suspended immediately prior to use. Lyophilized forms are also contemplated. The pharmaceutical composition can be contained within a lipid particle or vesicle, such as a liposome or microcrystal, which is also suitable for parenteral administration. The particles can be of any suitable structure, such as unilamellar or plurilamellar, so long as compositions are contained therein. Compounds can be entrapped in “stabilized plasmid-lipid particles” (SPLP) containing the fusogenic lipid dioleoylphosphatidylethanolamine (DOPE), low levels (5-10 mol %) of cationic lipid, and stabilized by a polyethyleneglycol (PEG) coating (Zhang Y. P. et al., Gene Ther. 1999, 6: 1438-47). Positively charged lipids such as N-[1-(2,3-dioleoyloxi)propyl]-N,N,N-trimethyl-amoniummethylsulfate, or “DOTAP,” are particularly preferred for such particles and vesicles. The preparation of such lipid particles is well known. See, e.g., U.S. Pat. Nos. 4,880,635; 4,906,477; 4,911,928; 4,917,951; 4,920,016; and 4,921,757; each of which is incorporated herein by reference.

[0936] The pharmaceutical composition described herein can be administered or packaged as a unit dose, for example. The term “unit dose” when used in reference to a pharmaceutical composition of the present disclosure refers to physically discrete units suitable as unitary dosage for the subject, each unit containing a predetermined quantity of active material calculated to produce the desired therapeutic effect in association with the required diluent; i.e., carrier, or vehicle.

[0937] Further, the pharmaceutical composition can be provided as a pharmaceutical kit comprising (a) a container containing a compound of the invention in lyophilized form and (b) a second container containing a pharmaceutically acceptable diluent (e.g., sterile used for reconstitution or dilution of the lyophilized compound of the invention. Optionally associated with such container(s) can be a notice in the form prescribed by a governmental agency regulating the manufacture, use or sale of pharmaceuticals or biological products, which notice reflects approval by the agency of manufacture, use or sale for human administration.

[0938] In another aspect, an article of manufacture containing materials useful for the treatment of the diseases described above is included. In some embodiments, the article of manufacture comprises a container and a label. Suitable containers include, for example, bottles, vials, syringes, and test tubes. The containers can be formed from a variety of materials such as glass or plastic. In some embodiments, the container holds a composition that is effective for treating a disease described herein and can have a sterile access port. For example, the container can be an intravenous solution bag or a vial having a stopper pierceable by a hypodermic injection needle. The active agent in the composition is a compound of the invention. In some embodiments, the label on or associated with the container indicates that the composition is used for treating the disease of choice. The article of manufacture can further comprise a second container comprising a pharmaceutically-acceptable buffer, such as phosphate-buffered saline, Ringer's solution, or dextrose solution. It can further include other materials desirable from a commercial and user standpoint, including other buffers, diluents, filters, needles, syringes, and package inserts with instructions for use.

[0939] In some embodiments, any of the fusion proteins, gRNAs, and/or complexes described herein are provided as part of a pharmaceutical composition. In some embodiments, the pharmaceutical composition comprises any of the fusion proteins or complexes provided herein. In some embodiments, the pharmaceutical composition comprises any of the complexes provided herein. In some embodiments, the pharmaceutical composition comprises a ribonucleoprotein complex comprising an RNA-guided nuclease (e.g., Cas9) that forms a complex with a gRNA and a cationic lipid. In some embodiments pharmaceutical composition comprises a gRNA, a nucleic acid programmable DNA binding protein, a cationic lipid, and a pharmaceutically acceptable excipient. In embodiments, pharmaceutical compositions comprise a lipid nanoparticle and a pharmaceutically acceptable excipient. In embodiments, the lipid nanoparticle contains a gRNA, a base editor, a complex, a base editor system, or a component thereof of the present disclosure, and/or one or more polynucleotides encoding the same. Pharmaceutical compositions can optionally comprise one or more additional therapeutically active substances.

[0940] In some embodiments, compositions provided herein are administered to a subject, for example, to a human subject, in order to effect a targeted genomic modification within the subject. In some embodiments, cells are obtained from the subject and contacted with any of the pharmaceutical compositions provided herein. In some embodiments, cells removed from a subject and contacted ex vivo with a pharmaceutical composition are re-introduced into the subject, optionally after the desired genomic modification has been effected or detected in the cells. Methods of delivering pharmaceutical compositions comprising nucleases are known, and are described, for example, in U.S. Pat. Nos. 6,453,242; 6,503,717; 6,534,261; 6,599,692; 6,607,882; 6,689,558; 6,824,978; 6,933,113; 6,979,539; 7,013,219; and 7,163,824, the disclosures of all of which are incorporated by reference herein in their entireties. Although the descriptions of pharmaceutical compositions provided herein are principally directed to pharmaceutical compositions which are suitable for administration to humans, it will be understood by the skilled artisan that such compositions are generally suitable for administration to animals or organisms of all sorts, for example, for veterinary use.

[0941] Modification of pharmaceutical compositions suitable for administration to humans in order to render the compositions suitable for administration to various animals is well understood, and the ordinarily skilled veterinary pharmacologist can design and/or perform such modification with merely ordinary, if any, experimentation. Subjects to which administration of the pharmaceutical compositions is contemplated include, but are not limited to, humans and/or other primates; mammals, domesticated animals, pets, and commercially relevant mammals such as cattle, pigs, horses, sheep, cats, dogs, mice, and/or rats; and/or birds, including commercially relevant birds such as chickens, ducks, geese, and/or turkeys.

[0942] Formulations of the pharmaceutical compositions described herein can be prepared by any method known or hereafter developed in the art of pharmacology. In general, such preparatory methods include the step of bringing the active ingredient(s) into association with an excipient and/or one or more other accessory ingredients, and then, if necessary and/or desirable, shaping and/or packaging the product into a desired single- or multi-dose unit. Pharmaceutical formulations can additionally comprise a pharmaceutically acceptable excipient, which, as used herein, includes any and all solvents, dispersion media, diluents, or other liquid vehicles, dispersion or suspension aids, surface active agents, isotonic agents, thickening or emulsifying agents, preservatives, solid binders, lubricants and the like, as suited to the particular dosage form desired. Remington's The Science and Practice of Pharmacy, 21st Edition, A. R. Gennaro (Lippincott, Williams & Wilkins, Baltimore, MD, 2006; incorporated in its entirety herein by reference) discloses various excipients used in formulating pharmaceutical compositions and known techniques for the preparation thereof. See also PCT application PCT/US2010/055131 (Publication number WO2011/053982 A8, filed Nov. 2, 2010), incorporated in its entirety herein by reference, for additional suitable methods, reagents, excipients and solvents for producing pharmaceutical compositions comprising a nuclease.

[0943] Except insofar as any conventional excipient medium is incompatible with a substance or its derivatives, such as by producing any undesirable biological effect or otherwise interacting in a deleterious manner with any other component(s) of the pharmaceutical composition, its use is contemplated to be within the scope of this disclosure.

[0944] The compositions, as described above, can be administered in effective amounts. The effective amount will depend upon the mode of administration, the particular condition being treated, and the desired outcome. It may also depend upon the stage of the condition, the age and physical condition of the subject, the nature of concurrent therapy, if any, and like factors well-known to the medical practitioner. For therapeutic applications, it is that amount sufficient to achieve a medically desirable result.

[0945] In some embodiments, compositions in accordance with the present disclosure can be used for treatment of any of a variety of diseases, disorders, and/or conditions.

### Methods of Treatment

[0946] Some aspects of the present invention provide methods of treating a subject in need, the method comprising administering to a subject in need an effective therapeutic amount of a pharmaceutical composition as described herein. More specifically, the methods of treatment include administering to a subject in need thereof one or more pharmaceutical compositions described herein, optionally comprising one or more cells having at least one edited gene. In other embodiments, the methods of the invention comprise expressing or introducing into a cell a base editor polypeptide and one or more guide RNAs capable of targeting a nucleic acid molecule encoding at least one polypeptide.

[0947] In embodiments the subject is an animal and the pharmaceutical composition is administered by intracerebroventricular injection, intra-thecal injection (e.g., a lumbar intra-thecal injection), and/or intracisternal magna injection (intracisternal injection). In embodiments, the pharmaceutical composition contains an AAV vector, or a lipid nanoparticle (LNP).

[0948] In embodiments, the methods provided herein are associated with the reduction of a symptom of spinal muscular atrophy in a subject. In embodiments, the methods are associated with improved health in a subject and/or improved blood pressure levels in a subject.

### Kits

[0949] The invention provides kits for the treatment of spinal muscular atrophy in a subject. In some embodiments, the kit further includes a base editor system or a polynucleotide encoding a base editor system, wherein the base editor polypeptide system a nucleic acid programmable DNA binding protein (napDNAbp), a deaminase, and a guide RNA. In some embodiments, the napDNAbp is Cas9 or Cas12. In some embodiments, the polynucleotide encoding the base editor is a mRNA sequence. In some embodiments, the deaminase is a cytidine deaminase or an adenosine deaminase. In some embodiments, the kit comprises an edited cell and instructions regarding the use of such cell.

[0950] The kits may further comprise written instructions for using a base editor, base editor system and/or edited cell as described herein. In other embodiments, the instructions include at least one of the following: precautions; warnings; clinical studies; and/or references. The instructions may be printed directly on the container (when present), or as a label applied to the container, or as a separate sheet, pamphlet, card, or folder supplied in or with the container. In a further embodiment, a kit can comprise instructions in the form of a label or separate insert (package insert) for suitable operational parameters. In yet another embodiment, the kit can comprise one or more containers with appropriate positive and negative controls or control samples, to be used as standard(s) for detection, calibration, or normalization. The kit can further comprise a second container comprising a pharmaceutically-acceptable buffer, such as (sterile) phosphate-buffered saline, Ringer's solution, or dextrose solution. It can further include other materials desirable from a commercial and user standpoint, including other buffers, diluents, filters, needles, syringes, and package inserts with instructions for use.

[0951] The practice of the present invention employs, unless otherwise indicated, conventional techniques of molecular biology (including recombinant techniques), microbiology, cell biology, biochemistry and immunology, which are well within the purview of the skilled artisan. Such techniques are explained fully in the literature, such as, “Molecular Cloning: A Laboratory Manual”, second edition (Sambrook, 1989); “Oligonucleotide Synthesis” (Gait, 1984); “Animal Cell Culture” (Freshney, 1987); “Methods in Enzymology” “Handbook of Experimental Immunology” (Weir, 1996); “Gene Transfer Vectors for Mammalian Cells” (Miller and Calos, 1987); “Current Protocols in Molecular Biology” (Ausubel, 1987); “PCR: The Polymerase Chain Reaction”, (Mullis, 1994); “Current Protocols in Immunology” (Coligan, 1991). These techniques are applicable to the production of the polynucleotides and polypeptides of the invention, and, as such, may be considered in making and practicing the invention. Particularly useful techniques for particular embodiments will be discussed in the sections that follow.

[0952] The following examples are put forth so as to provide those of ordinary skill in the art with a complete disclosure and description of how to make and use the assay, screening, and therapeutic methods of the invention, and are not intended to limit the scope of what the inventors regard as their invention.

### EXAMPLES

### Example 1. A Cytidine Base Editor (CBE) Introduced a C-to-T Alteration to an SMN2 Polynucleotide

[0953] In this example, a cytidine base editor (CBE) was used to introduce a precise C-to-T alteration in an SMN2 polynucleotide, where the alterations are likely associated with increased levels of an SMN polypeptide in a cell. Such an increase in SMN polypeptide levels can compensate for low levels of SMN1 polynucleotide and/or SMN1 activity in the cell and can be used as an effective treatment for spinal muscular atrophy. The alterations are likely associated with increased production of full-length transcripts from the SMN2 polynucleotide. The C-to-T base change results in a C10T, C7T, or C11T alteration in Intron 7 of the SMN1 polynucleotide. The guide RNAs used to target the CBE to effect these alterations contained the spacers provided in Table 2A.

[0954] Base editing was tested in a lenti-HEK cell line. Guide RNAs (gRNA) containing the spacers listed in Table 2A were used in conjunction with BE4 or pmCDA-BE4 (see FIGS. 2-5). The base editor systems containing the guide RNAs and the CBEs effected the C10T, C7T, and C11T alterations to Intron 7 of the SMN2 polynucleotide (see FIGS. 2-5).

### Example 2. Using Base Editors to Introduce Alterations to Regulatory Elements of an SMN2 Polynucleotide Sequence

[0955] In this example, adenosine base editors (ABEs) and cytidine base editors (CBEs) are used to introduce precise A-to-G or C-to-T alterations, respectively, in an SMN2 polynucleotide. The alterations are likely associated with increased levels of an SMN polypeptide in a cell. Such an increase in SMN polypeptide levels can compensate for low levels of SMN1 polynucleotide and/or SMN1 activity in the cell and can be used as an effective treatment for spinal muscular atrophy. The alterations are likely associated with increased production of full-length transcripts from the SMN2 polynucleotide. Non-limiting examples of target alterations include a T6C and/or A54G alteration in Exon 7 of an SMN2 polynucleotide, and a C10T alteration in Intron 7 of an SMN2 polynucleotide.

[0956] As a first step in effecting alterations to the SMN2 polynucleotide to increase production of full-length transcripts, in silico screens are completed to identify candidate guide RNAs for splice site modulation. Guides with canonical PAMs are prioritized, with other base editor variants considered as well. All guides compatible with various regulatory regions surrounding Exon 7 (about 125 bp upstream and downstream) are identified, with priority given to ABE targets proximal to canonical PAMs. Guides demonstrating undesired guide-dependent off-target profiles are eliminated.

[0957] Next, guide RNAs are screened in modified HEK293T cells. HEK cells are modified with a GFP reporter insertion to easily distinguish SMN2 from SMN1 readouts, and to facilitate assays for exon inclusion (see, e.g., Hua, et al. “Enhancement of SMN2 Exon 7 inclusion by Antisense Oligonucleotides Targeting the Exon,” PLoS

[0958] The gRNAs encompass the scaffold sequence and the spacer sequences as provided herein, or as determined based on the knowledge of the skilled practitioner and as would be understood to the skilled practitioner in the art as suitable for use in disruption of splicing. (See, e.g., Komor, A. C., et al., “Programmable editing of a target base in genomic DNA without double-stranded DNA cleavage” Nature 533, 420-424 (2016); Gaudelli, N. M., et al., “Programmable base editing of A•T to G•C in genomic DNA without DNA cleavage” Nature 551, 464-471 (2017); Komor, A. C., et al., “Improved base excision repair inhibition and bacteriophage Mu Gam protein yields C:G-to-T:A base editors with higher efficiency and product purity” Science Advances 3:eaao4774 (2017), and Rees, H. A., et al., “Base editing: precision chemistry on the genome and transcriptome of living cells.” Nat Rev Genet. 2018 December; 19(12):770-788. doi: 10.1038/s41576-018-0059-1).

[0959] For targeted mutations, and some mutations in Intron 6, a lenti-HEK line containing a limited region of an SMN2 polynucleotide is used as a screening tool to evaluate editing efficiencies. Exon inclusion is measured as a follow-up. Guide sequences are evaluated in combination with various of the base editors provided herein to identify combinations that are associated with base editing efficiencies of greater than 30%.

[0960] Guides associated with high base editing efficiencies (e.g., efficiencies greater than 30%) are validated in human fibroblasts, including primary fibroblasts, from patients with spinal muscular atrophy. The base editors are introduced to the cells using electroporation. If many guides are screened, some base editors are pre-screened in SHSY5Y cells. Top validated hits are functionally assessed (e.g., quantification of exon inclusion by qPCR, and/or assessment of SMN protein level restoration by ELISA or Western Blott).

[0961] Following functional assessment, top hits are evaluated using in vivo and in vitro modeling in patient-derived cells. Top hits are evaluated in mouse/rat models of SMA. Top hits are also evaluated for off-target binding using ONE-SEQ, Digenome-Seq, and/or rhAMPSeq.

[0962] Various delivery strategies are evaluated, including lipid nanoparticles. Delivery strategies are assessed in rats. The base editor systems are delivered by intrathecal injection into the cisterna magna, as well as by lumbar puncture. In vivo dose-ranges are evaluated, durability of the edits is evaluated, biodistribution is determined, and safety data is gathered (e.g., minimal effective dose, optimal effective dose, maximum tolerance dose).

[0963] Efficacy of base editing is evaluated in transgenic mouse models of SMA as well as in patient iPSC-derived neurons. Editing and exon inclusion is evaluated by intrathecal and/or intracerebroventricular delivery to the mice. The patient-derived iPSCs are differentiated to motor neurons and other cell types. The base editor systems are delivered to the differentiated iPSCs by lipid nanoparticles. Editing and exon inclusion, as well as restoration of SMN polypeptide expression, is evaluated in the differentiated iPSCs.

[0964] Delivery and editing are assessed in non-human primates. Dose-range finding is conducted in the non-human primates and durability of the edits and biodistribution are determined, and safety data is gathered (e.g., minimal effective dose, optimal effective dose, and maximum tolerated dose).

### Example 3. Developing Base Editor Systems

[0965] Experiments were undertaken to develop base editor systems suitable for use in introducing nucleobase alterations (e.g., C4→T or A→G) to an SMN2 polynucleotide. In particular, guide polynucleotides were designed for use in targeting base editors to deaminate nucleobases in an SMN2 polynucleotide to increase levels of incorporation of Exon 7 into spliced SMN2 transcripts expressed from the SMN2 polynucleotide (see, FIG. 16 and Tables 2B and 2C). In particular, guides polynucleotides were designed to introduce one of the following alterations to the SMN2 polynucleotide, among others: deamination of nucleobase C10 or C11 of Intron 7 of SMN2; deamination of the adenosine complementary to nucleobase T6 in Exon 7 of SMN2; deamination of nucleobase A54 of Exon 7 of SMN2 (see FIG. 7).

[0966] In an initial screen to identify effective base editor systems comprising the guide polynucleotides, HepG2 cells were contacted with base editor systems containing the guides listed along the x-axes of FIGS. 17, 18, and 21 and the adenosine base editor ABE8.20, the cytidine base editor ppAPOBEC1, or one of the inlaid base editors (IBEs) IBE16, IBE12, IBE11 indicated on the x-axes of FIGS. 17, 18, and 21. The inlaid base editors each contained a TadA*8.20 deaminase domain. Further details relating to the base editors used in combination with the guide polynucleotides listed in FIG. 17 are provide in Table 21 below. The HepG2 cells were transfected with mRNA encoding the base editor and a guide polynucleotide using lipofectamine MessangerMAX. Base editing efficiencies for editing of SMN2 were evaluated in triplicate. A number of the base editor systems achieved base editing efficiencies of greater than 40%. About 30 of the base editor systems evaluated had base editing efficiencies of over 25% in the HepG2 cells. The screen allowed for the identification of base editor systems effective in altering a nucleobase in SMN2. The inlaid base editors (IBEs) were effective at facilitating base editing of SMN2 in the cells.

TABLE 21
Details relating to base editor systems of FIG. 17. See Tables 2B and 2C for guide sequences.
For the ABEs listed, 8.20 indicates TadA*8.20, and the final letters indicate the PAM sequence
recognized by the indicated Cas9. For the CBEs listed, ppAPOBEC1 indicates the cytidine
deaminase, and the final letters indicate the PAM sequence recognized by the indicated Cas9.
“Sa” indicates “Staplylococcus aureus,” “Sp” indicates “Streptococcus pyogenes.”

| | Name for | Name for | | |
|---|---|---|---|---|
| | mRNA | mRNA | | |
| Guide | encoding | encoding | | |
| Name | the ABE | the CBE | ABE | CBE |
| gRNA1975 | MRNA2001 | MRNA1895 | ABE_8.20_SaCas9_NNGRRT | CBE_ppAPOBEC1_SaCas9_NNGRRT |
| gRNA1981 | MRNA2005 | MRNA1899 | ABE_8.20_SaCas9_NNNRRT | CBE_ppAPOBEC1_SaCas9_NNNRRT |
| gRNA1970 | MRNA1907 | MRNA1986 | ABE_8.20_SpCas9_NGG | CBE_ppAPOBEC1_SpCas9_NGG |
| gRNA1982 | MRNA2005 | MRNA1899 | ABE_8.20_SaCas9_NNNRRT | CBE_ppAPOBEC1_SaCas9_NNNRRT |
| gRNA1989 | MRNA2005 | MRNA1899 | ABE_8.20_SaCas9_NNNRRT | CBE_ppAPOBEC1_SaCas9_NNNRRT |
| gRNA1960 | MRNA1998 | MRNA1891 | ABE_8.20_SpCas9_NGA | CBE_ppAPOBEC1_SpCas9_NGA |
| gRNA1972 | MRNA1907 | MRNA1986 | ABE_8.20_SpCas9_NGG | CBE_ppAPOBEC1_SpCas9_NGG |
| gRNA1973 | MRNA1907 | MRNA1986 | ABE_8.20_SpCas9_NGG | CBE_ppAPOBEC1_SpCas9_NGG |
| gRNA1977 | MRNA2001 | MRNA1895 | ABE_8.20_SaCas9_NNGRRT | CBE_ppAPOBEC1_SaCas9_NNGRRT |
| gRNA1974 | MRNA1907 | MRNA1986 | ABE_8.20_SpCas9_NGG | CBE_ppAPOBEC1_SpCas9_NGG |
| gRNA1966 | MRNA1998 | MRNA1891 | ABE_8.20_SpCas9_NGA | CBE_ppAPOBEC1_SpCas9_NGA |
| gRNA1962 | MRNA1998 | MRNA1891 | ABE_8.20_SpCas9_NGA | CBE_ppAPOBEC1_SpCas9_NGA |
| gRNA1992 | MRNA2005 | MRNA1899 | ABE_8.20_SaCas9_NNNRRT | CBE_ppAPOBEC1_SaCas9_NNNRRT |
| gRNA1976 | MRNA2001 | MRNA1895 | ABE_8.20_SaCas9_NNGRRT | CBE_ppAPOBEC1_SaCas9_NNGRRT |
| gRNA1971 | MRNA1907 | MRNA1986 | ABE_8.20_SpCas9_NGG | CBE_ppAPOBEC1_SpCas9_NGG |
| gRNA1967 | MRNA1998 | MRNA1891 | ABE_8.20_SpCas9_NGA | CBE_ppAPOBEC1_SpCas9_NGA |
| gRNA2027 | MRNA2005 | MRNA1899 | ABE_8.20 SaCas9_NNNRRT | CBE_ppAPOBEC1_SaCas9_NNNRRT |
| gRNA2019 | MRNA1907 | MRNA1986 | ABE_8.20_SpCas9_NGG | CBE_ppAPOBEC1_SpCas9_NGG |
| gRNA2025 | MRNA2005 | MRNA1899 | ABE_8.20_SaCas9_NNNRRT | CBE_ppAPOBEC1_SaCas9_NNNRRT |
| gRNA2026 | MRNA2005 | MRNA1899 | ABE_8.20_SaCas9_NNNRRT | CBE_ppAPOBEC1_SaCas9_NNNRRT |
| gRNA2021 | MRNA1907 | MRNA1986 | ABE_8.20_SpCas9_NGG | CBE_ppAPOBEC1_SpCas9_NGG |

[0967] Next, having established which guide-base editor combinations were effective in carrying out base editing in the HepG2 cells, screens were conducted to determine the effect of nucleobase alterations introduced to an SMN2 polynucleotide in spinal muscular atrophy (SMA) fibroblast cells (GM03813 cells) on the incorporation of Exon 7 into spliced transcripts expressed form the SMN2 polynucleotide. The GM03813 cells were homozygous for a deletion of Exons 7 and 8 of SMN1 and contained 3 copies of the SMN2 gene. As a first step in undertaking the screens, a screen was undertaken using two different doses of the base editor system. At one dose, cells were contacted with 300 ng of mRNA encoding a base editor and 100 ng of a guide polynucleotide (see FIGS. 20A and 19). At another dose, cells were contacted with 60 ng of mRNA encoding the base editor and 30 ng of the guide polynucleotide (see FIGS. 20B and 19). It was determined that the dose containing 60 ng of mRNA encoding the base editor and 30 ng of the guide polynucleotide resulted in better editing efficiencies and cell survival rates post-transduction than the higher dose. Therefore, all subsequent screens using the SMA fibroblast cells were undertaken using the lower dose of the base editor system.

[0968] Having established an optimized dose of the base editor system to use in the screens, further screens were conducted to evaluate the effect of base editing using the systems on incorporation of Exon 7 into spliced transcripts expressed from the SMN2 polynucleotide (FIGS. 8A-8C, 10A-10C, 12A-12C, and 13A-13C). The following base editor systems were screened: ABE+gRNA1971; CBE+gRNA1977; ABE+gRNA1970; CBE+gRNA1976; ABE+gRNA1967; CBE+gRNA1966; ABE+gRNA1966; CBE+gRNA1962; ABE+gRNA1962; CBE+gRNA1960 (FIGS. 8A-8C); CBE+gRNA1989; CBE+gRNA1982; CBE+gRNA1992; ABE+gRNA1992; ABE+gRNA1981; ABE+gRNA1976; ABE+gRNA1975; ABE+gRNA1974; ABE+gRNA1973; ABE+gRNA1972 (FIGS. 10A-10C); CBE+gRNA2027; CBE+gRNA2026; CBE+gRNA2025; CBE+gRNA1974; ABE+gRNA2027; ABE+gRNA2025; ABE+gRNA2021; ABE+gRNA2019; ABE+gRNA1989; ABE+gRNA1977 (FIGS. 12A-12C); ABE+gRNA2349; IBE11+gRNA2018; IBE12+gRNA2018; IBE16+gRNA2018; ABE+gRNA2345; IBE11+gRNA1960; IBE12+gRNA1960; IBE16+gRNA1960; NGA+gRNA1960 (FIGS. 13A-13C). See Table 22 for further details relating to the base editor systems. The base editors IBE11, IBE12, and IBE16 each contained a TadA*8.20 adenosine deaminase domain. SMA patient fibroblast cells (GM03813 cells) were transfected with 60 ng of mRNA encoding the base editor and 30 ng of the guide polynucleotide for each base editor system. Following transfection, total SMN transcript levels, levels of SMN transcripts containing Exon 7, and levels of SMN transcripts lacking Exon 7 were measured using qRT-PCR. Base editing efficiencies were also measured for the following base editing systems (see FIG. 25): NGA+gRNA1960; IBE16+gRNA1960; IBE12+gRNA1960; IBE11+gRNA1960; ABE+gRNA2345; and ABE+gRNA2349. The following base editing systems were effective at introducing alterations to SMN2 that were associated with increased levels of spliced SMN2 transcripts containing Exon 7 and reduced levels of spliced transcripts lacking Exon 7: CBE+gRNA1962; ABE+gRNA1962; ABE+gRNA1973; ABE+gRNA2349.

TABLE 22
Details relating to base editor systems of FIGS. 8A to 13C. Each base
editor is named using the following convention: [Name of Type of Base
Editor]_[Deaminase Domain]_[nucleic acid programmable DNA
binding protein domain]_[PAM sequence], where “Sa” indicates
“Staplylococcus aureus,” “Sp” indicates “Streptococcus pyogenes,” and
“8.20” indicates “TadA*8.20.” See Tables 2B and 2C for guide sequences.

| | Name for | |
|---|---|---|
| | mRNA | |
| Type of Base Editor | Encoding the | |
| Used and Guide Name | Base Editor | Base Editor |
| CBE/88 | mRNA2923 | CBE_ppAPOBEC1_SpCas9_NGG |
| ABE/88 | mRNA2926 | ABE_8.20_SpCas9_NGG |
| ABE/1971 | mRNA2926 | ABE_8.20_SpCas9_NGG |
| CBE/1977 | mRNA2745 | CBE_ppAPOBEC1_SaCas9_NNGRRT |
| ABE/1970 | mRNA2926 | ABE_8.20_SpCas9_NGG |
| CBE/1976 | mRNA2889 | ABE_8.20_SaCas9_NNGRRT |
| ABE/1967 | mRNA2928 | ABE_8.20_SpCas9_NGA |
| CBE/1966 | mRNA2744 | CBE_ppAPOBEC1_SpCas9_NGA |
| ABE/1966 | mRNA2928 | ABE_8.20_SpCas9_NGA |
| CBE/1962 | mRNA2744 | CBE_ppAPOBEC1_SpCas9_NGA |
| ABE/1962 | mRNA2928 | ABE_8.20_SpCas9_NGA |
| CBE/1960 | mRNA2744 | CBE_ppAPOBEC1_SpCas9_NGA |
| ABE/gRNA1972 | mRNA2926 | ABE_8.20_SpCas9_NGG |
| ABE/gRNA1973 | mRNA2926 | ABE_8.20_SpCas9_NGG |
| ABE/gRNA1974 | mRNA2926 | ABE_8.20_SpCas9_NGG |
| ABE/gRNA1975 | mRNA2889 | ABE_8.20_SaCas9_NNGRRT |
| ABE/gRNA1976 | mRNA2889 | ABE_8.20_SaCas9_NNGRRT |
| ABE/gRNA1981 | mRNA2892 | ABE_8.20_SaCas9_NNNRRT |
| ABE/gRNA1992 | mRNA2892 | ABE_8.20_SaCas9_NNNRRT |
| CBE/gRNA1992 | mRNA2225 | CBE_ppAPOBEC1_SaCas9_NNNRRT |
| CBE/gRNA1982 | mRNA2225 | CBE_ppAPOBEC1_SaCas9_NNNRRT |
| CBE/gRNA1989 | mRNA2225 | CBE_ppAPOBEC1_SaCas9_NNNRRT |
| ABE/gRNA1977 | mRNA2889 | ABE_8.20_SaCas9_NNGRRT |
| ABE/gRNA1989 | mRNA2892 | ABE_8.20_SaCas9_NNNRRT |
| ABE/gRNA2019 | mRNA2926 | ABE_8.20_SpCas9_NGG |
| ABE/gRNA2021 | mRNA2926 | ABE_8.20_SpCas9_NGG |
| ABE/gRNA2025 | mRNA2892 | ABE_8.20_SaCas9_NNNRRT |
| ABE/gRNA2027 | mRNA2892 | ABE_8.20_SaCas9_NNNRRT |
| CBE/gRNA1974 | mRNA2923 | CBE_ppAPOBEC1_SpCas9_NGG |
| CBE/gRNA2025 | mRNA2225 | CBE_ppAPOBEC1_SaCas9_NNNRRT |
| CBE/gRNA2026 | mRNA2225 | CBE_ppAPOBEC1_SaCas9_NNNRRT |
| CBE/gRNA2027 | mRNA2225 | CBE_ppAPOBEC1_SaCas9_NNNRRT |
| NGA/gRNA1960 | mRNA2928 | ABE_8.20_SpCas9_NGA |
| IBE16/gRNA1960 | mRNA3165 | IBE16_ABE_8.20_SpCas9_NGA |
| | | (SEQ ID NO: 637) |
| IBE12/gRNA1960 | mRNA3166 | IBE12_ABE_8.20_SpCas9_NGA |
| | | (SEQ ID NO: 635) |
| IBE11/gRNA1960 | mRNA3168 | IBE11_ABE_8.20_SpCas9_NGA |
| | | (SEQ ID NO: 633) |
| ABE/gRNA2345 | mRNA2866 | ABE_8.20_SpCas9_NRTH |
| ABE/gRNA2349 | mRNA2866 | ABE_8.20_SpCas9_NRTH |

[0969] Further experiments were undertaken to evaluate base editing efficiencies in SMA patient fibroblast cells (GM03813 cells) for the following base editor systems that performed well in the above screens: ABE+gRNA1962 (FIG. 9A), CBE+gRNA1962 (FIG. 9B), and ABE+gRNA1973 (FIG. 11A). The base editor system ABE+gRNA1962, which targeted the two As boxed in FIG. 9C for deamination, had a maximum A to G percent base editing efficiency of over 60%. The base editor system CBE+gRNA1962, which targeted the two Cs boxed in FIG. 9C for deamination, had a maximum C to T percent base editing efficiency of over 8000. The base editor system ABE+gRNA1973, which targeted the four As boxed in FIG. 11B, had a maximum A to G percent base editing efficiency of over 60%.

[0970] An experiment was undertaken to confirm that splicing changes observed following base editing of the SMA patient fibroblast cells were associated with base editing and not the result of binding of the base editor system SMN2. SMA patient fibroblast cells (GM03813 cells) were transduced with mRNA encoding the base editors indicate along the x-axis of FIGS. 24 and 26 in combination with the indicated guide polynucleotides. See Table 23 for further details relating to the base editor systems of FIG. 24. Five (5) days following transduction, levels of spliced SMN2 transcripts containing Exon 7 were measured. By comparing levels of spliced SMN2 transcripts containing Exon 7 in cells base edited using a catalytically active base editor or a corresponding base editor variant with low-to-no base editing activity (i.e., dead), it was confirmed that the observed changes in transcript levels in the base edited cells was associated with base editing and not simply with binding of a base editor to a target nucleotide without any deamination.

TABLE 23
Details relating to base editor systems of FIG. 24. Each base
editor is named using the following convention: [Name of Type of Base
Editor]_[Deaminase Domain]_[nucleic acid programmable DNA
binding protein domain]_[PAM sequence], where “Sa” indicates
“Staplylococcus aureus,” “Sp” indicates “Streptococcus pyogenes,” and
“8.20” indicates “TadA*8.20.” See Tables 2B and 2C for guide sequences.

| | Name for | |
|---|---|---|
| | mRNA | |
| Type of Base Editor | encoding the | |
| Used and Guide Name | Base Editor | Base Editor |
| IBE16/gRNA2018 | mRNA3167 | IBE16_ABE_8.20_SpCas9_NGC (SEQ ID NO: 643) |
| IBE12/gRNA2018 | mRNA3170 | IBE12_ABE_8.20_SpCas9_NGC (SEQ ID NO: 641) |
| IBE11/gRNA2018 | mRNA2959 | IBE11_ABE_8.20_SpCas9_NGC (SEQ ID NO: 639) |
| CBE/g1962 | mRNA2744 | CBE_ppAPOBEC1_SpCas9_NGA |
| ABE/g1962 | mRNA2928 | ABE_8.20_SpCas9_NGA |
| deadABE/g1962 | mRNA2971 | dead_ABE_dABE8.20_E59Q_SpCas9_NGA |
| ABE/g1973 | mRNA2926 | ABE_8.20_SpCas9_NGG |
| deadABE/g1973 | mRNA2970 | dead_ABE_dABE8.20_E59Q_SpCas9_NGG |
| ABE/g2439 | mRNA2866 | ABE_8.20_SpCas9_NRTH |
| deadABE/g2349 | mRNA2975 | dead_ABE_dABE8.20_E59Q_SpCas9_NRTH |

[0971] Experiments were next undertaken to evaluate base editor systems identified as described above in the SMA patient fibroblast cell lines GM00232 and GM09677. GM00232 cells were chosen because this patient fibroblast line was homozygous for deletion of exons 7 and 8 in the SMN1 gene, contained 2 copies of the SMN2 gene, and were of a different genetic background than the GM03813 cells, which contained 3 copies of the SMN2 gene. GM09677 cells were chosen because they too were homozygous for deletion of exons 7 and 8 in the SMN1 gene, had the same number of SMN2 copies as GM03813 cells, and had a different genetic background than the GM03813 cells. The effect of base editing in the two SMA fibroblast cell lines on incorporation of Exon 7 into spliced transcripts expressed from the SMN2 polynucleotide was evaluated (FIGS. 31, 32, 33A-33C, and 34A-34C). The following base editor systems were evaluated: CBE (encoded by mRNA2744)+gRNA1962; CBE (encoded by mRNA2745)+gRNA1976; ABE (encoded by mRNA2926)+gRNA1974; and ABE (encoded by mRNA2892)+gRNA1992 (see mRNA sequences and corresponding amino acid sequences provided in Table 23.1 below). As negative controls, the following systems were evaluated, which lacked base editing activity: deadCBE (encoded by mRNA2971)+gRNA1962; deadCBE (encoded by mRNA2972)+gRNA1976; deadABE (encoded by mRNA2970)+gRNA1974; and deadABE (encoded by mRNA2973)+gRNA1992 (see mRNA sequences and corresponding amino acid sequences provided in Table 23.1 below). The SMA patient fibroblast cells were transfected with 60 ng of mRNA encoding the base editor and 30 ng of the guide polynucleotide for each base editor system. Following transfection, total SMN transcript levels, levels of SMN transcripts containing Exon 7, and levels of SMN transcripts lacking Exon 7 were measured using qRT-PCR. In the GM09677 cells, dead base editors were evaluated side-by-side with active editors to confirm that the splicing changes (exon 7 inclusion+exclusion levels) measured were not due to guide/base editor binding or steric hindrance, and to confirm that the changes likely resulted only from base editing. All of the base editor systems evaluated performed similarly in all three SMA patient fibroblast cell lines (GM03813, GM00232, and GM00967), including rank order and relative magnitude of change.

TABLE 23.1
Sequences encoding base editors.

| Sequence | |
|---|---|
| Description | Sequence |
| Nucleotide | TCTAGAGTTTAAACATTTAAATCTGCAGATCCCAATGGCGCGCCGAGCTTGGCT |
| sequence | CGAGCATGGTCATAGCTGTTTCCTGTGTGAAATTGTTATCCGCTCACAATTCCA |
| of a | CACAACATACGAGCCGGAAGCATAAAGTGTAAAGCCTGGGGTGCCTAATGAGTG |
| plasmid | AGCTAACTCACATTAATTGCGTTGCGCTCACTGCCCGCTTTCCAGTCGGGAAAC |
| encoding | CTGTCGTGCCAGCTGCATTAATGAATCGGCCAACGCGCGGGGAGAGGCGGTTTG |
| mRNA2744 | CGTATTGGGCACTCTTGCGCTTCCTCGCTCACTGACTCGCTGCGCTCGGTCGTT |
| | CGGCTGCGGCGAGCGGTATCAGCTCACTCAAAGGCGGTAATACGGTTATCCACA |
| | GAATCAGGGGATAACGCAGGAAAGAACATGTGAGCAAAAGGCCAGCAAAAGGCC |
| | AGGAACCGTAAAAAGGCCGCGTTGCTGGCGTTTTTCCATAGGCTCCGCCCCCCT |
| | GACGAGCATCACAAAAATCGACGCTCAAGTCAGAGGTGGCGAAACCCGACAGGA |
| | CTATAAAGATACCAGGCGTTTCCCCCTGGAAGCTCCCTCGTGCGCTCTCCTGTT |
| | CCGACCCTGCCGCTTACCGGATACCTGTCCGCCTTTCTCCCTTCGGGAAGCGTG |
| | GCGCTTTCTCATAGCTCACGCTGTAGGTATCTCAGTTCGGTGTAGGTCGTTCGC |
| | TCCAAGCTGGGCTGTGTGCACGAACCCCCCGTTCAGCCCGACCGCTGCGCCTTA |
| | TCCGGTAACTATCGTCTTGAGTCCAACCCGGTAAGACACGACTTATCGCCACTG |
| | GCAGCAGCCACTGGTAACAGGATTAGCAGAGCGAGGTATGTAGGCGGTGCTACA |
| | GAGTTCTTGAAGTGGTGGCCTAACTACGGCTACACTAGAAGAACAGTATTTGGT |
| | ATCTGCGCTCTGCTGAAGCCAGTTACCTTCGGAAAAAGAGTTGGTAGCTCTTGA |
| | TCCGGCAAACAAACCACCGCTGGTAGCGGTGGTTTTTTTGTTTGCAAGCAGCAG |
| | ATTACGCGCAGAAAAAAAGGATCTCAAGAAGATCCTTTGATCTTTTCTACGGGG |
| | TCTGACGCTCAGTGGAACGAAAACTCACGTTAAGGGATTTTGGTCATGAGATTA |
| | TCAAAAAGGATCTTCACCTAGATCCTTTTAAATTAAAAATGAAGTTTTAAATCA |
| | ATCTAAAGTATATATGAGTAAACTTGGTCTGACAGTTAGAAAAACTCATCGAGC |
| | ATCAAATGAAACTGCAATTTATTCATATCAGGATTATCAATACCATATTTTTGA |
| | AAAAGCCGTTTCTGTAATGAAGGAGAAAACTCACCGAGGCAGTTCCATAGGATG |
| | GCAAGATCCTGGTATCGGTCTGCGATTCCGACTCGTCCAACATCAATACAACCT |
| | ATTAATTTCCCCTCGTCAAAAATAAGGTTATCAAGTGAGAAATCACCATGAGTG |
| | ACGACTGAATCCGGTGAGAATGGCAAAAGTTTATGCATTTCTTTCCAGACTTGT |
| | TCAACAGGCCAGCCATTACGCTCGTCATCAAAATCACTCGCATCAACCAAACCG |
| | TTATTCATTCGTGATTGCGCCTGAGCGAGACGAAATACGCGATCGCTGTTAAAA |
| | GGACAATTACAAACAGGAATCGAATGCAACCGGCGCAGGAACACTGCCAGCGCA |
| | TCAACAATATTTTCACCTGAATCAGGATATTCTTCTAATACCTGGAATGCTGTT |
| | TTCCCAGGGATCGCAGTGGTGAGTAACCATGCATCATCAGGAGTACGGATAAAA |
| | TGCTTGATGGTCGGAAGAGGCATAAATTCCGTCAGCCAGTTTAGTCTGACCATC |
| | TCATCTGTAACATCATTGGCAACGCTACCTTTGCCATGTTTCAGAAACAACTCT |
| | GGCGCATCGGGCTTCCCATACAATCGATAGATTGTCGCACCTGATTGCCCGACA |
| | TTATCGCGAGCCCATTTATACCCATATAAATCAGCATCCATGTTGGAATTTAAT |
| | CGCGGCCTAGAGCAAGACGTTTCCCGTTGAATATGGCTCATACTCTTCCTTTTT |
| | CAATATTATTGAAGCATTTATCAGGGTTATTGTCTCATGAGCGGATACATATTT |
| | GAATGTATTTAGAAAAATAAACAAATAGGGGTTCCGCGCACATTTCCCCGAAAA |
| | GTGCCACCTGACGTCTAAGAAACCATTATTATCATGACATTAACCTATAAAAAT |
| | AGGCGTATCACGAGGCCCTTTCGTCTCGCGCGTTTCGGTGATGACGGTGAAAAC |
| | CTCTGACACATGCAGCTCCCGGAGACGGTCACAGCTTGTCTGTAAGCGGATGCC |
| | GGGAGCAGACAAGCCCGTCAGGGCGCGTCAGCGGGTGTTGGCGGGTGTCGGGGC |
| | TGGCTTAACTATGCGGCATCAGAGCAGATTGTACTGAGAGTGCACCATATGCGG |
| | TGTGAAATACCGCACAGATGCGTAAGGAGAAAATACCGCATCAGGCGCCATTCG |
| | CCATTCAGGCTGCGCAACTGTTGGGAAGGGCGATCGGTGCGGGCCTCTTCGCTA |
| | TTACGCCAGCTGGCGAAAGGGGGATGTGCTGCAAGGCGATTAAGTTGGGTAACG |
| | CCAGGGTTTTCCCAGTCACGACGTTGTAAAACGACGGCCAGTGAATTGACGCGT |
| | ATTGGGATCGAGCTCGGTACCTAATACGACACACTATAAGGAAATAAGAGAGAA |
| | AAGAAGAGTAAGAAGAAATATAAGAGCCACCATGACCTCTGAGAAGGGCCCTAG |
| | CACAGGCGACCCCACCCTGCGGCGGAGAATCGAGAGCTGGGAGTTCGACGTGTT |
| | CTACGACCCTAGAGAACTGAGAAAGGAAACCTGCCTGCTGTACGAGATCAAGTG |
| | GGGCATGAGCAGAAAGATCTGGCGGAGCTCTGGCAAGAACACCACCAACCACGT |
| | GGAAGTGAATTTCATCAAGAAGTTCACCAGCGAGAGAAGGTTCCACAGCAGCAT |
| | CAGCTGCAGCATCACCTGGTTCCTGAGCTGGTCCCCTTGCTGGGAATGCAGCCA |
| | GGCCATCAGAGAGTTCCTGAGCCAACACCCCGGAGTGACACTGGTGATCTACGT |
| | GGCCAGACTGTTCTGGCACATGGACCAGAGAAACAGACAGGGCCTGAGAGATCT |
| | GGTCAACAGCGGCGTGACTATCCAGATCATGCGGGCCAGCGAGTACTACCACTG |
| | TTGGCGGAACTTCGTGAACTACCCCCCCGGCGATGAGGCCCACTGGCCTCAGTA |
| | CCCTCCTCTGTGGATGATGCTGTACGCCCTGGAACTGCACTGCATCATCCTGTC |
| | TCTGCCTCCATGTCTGAAGATCTCTAGAAGATGGCAGAACCACCTGGCCTTCTT |
| | CAGACTGCACCTGCAGAATTGCCACTACCAGACCATCCCCCCCCACATCCTGCT |
| | GGCTACAGGCCTGATCCACCCTTCTGTGACCTGGAGAAGCGGAGGATCTAGCGG |
| | CGGCTCTAGCGGATCTGAGACACCTGGCACAAGCGAGTCTGCCACACCTGAGAG |
| | TAGCGGCGGATCTTCTGGCGGCTCCGACAAGAAGTACTCTATCGGACTGGCCAT |
| | CGGCACCAACTCTGTTGGATGGGCCGTGATCACCGACGAGTACAAGGTGCCCAG |
| | CAAGAAATTCAAGGTGCTGGGCAACACCGACCGGCACAGCATCAAGAAGAATCT |
| | GATCGGCGCCCTGCTGTTCGACTCTGGCGAAACAGCCGAAGCCACCAGACTGAA |
| | GAGAACCGCCAGGCGGAGATACACCCGGCGGAAGAACCGGATCTGCTACCTGCA |
| | AGAGATCTTCAGCAACGAGATGGCCAAGGTGGACGACAGCTTCTTCCACAGACT |
| | GGAAGAGTCCTTCCTGGTGGAAGAGGACAAGAAGCACGAGCGGCACCCCATCTT |
| | CGGCAACATCGTGGATGAGGTGGCCTACCACGAGAAGTACCCCACCATCTACCA |
| | CCTGAGAAAGAAACTGGTGGACAGCACCGACAAGGCCGACCTGAGACTGATCTA |
| | CCTGGCTCTGGCCCACATGATCAAGTTCCGGGGCCACTTTCTGATCGAGGGCGA |
| | TCTGAACCCCGACAACAGCGACGTGGACAAGCTGTTCATCCAGCTGGTGCAGAC |
| | CTACAACCAGCTGTTCGAGGAAAACCCCATCAACGCCTCTGGCGTGGACGCCAA |
| | GGCTATCCTGTCTGCCAGACTGAGCAAGAGCAGAAGGCTGGAAAACCTGATCGC |
| | CCAGCTGCCTGGCGAGAAGAAGAATGGCCTGTTCGGCAACCTGATTGCCCTGAG |
| | CCTGGGACTGACCCCTAACTTCAAGAGCAACTTCGACCTGGCCGAGGATGCCAA |
| | ACTGCAGCTGAGCAAGGACACCTACGACGACGACCTGGACAATCTGCTGGCCCA |
| | GATCGGCGATCAGTACGCCGACTTGTTTCTGGCCGCCAAGAACCTGTCCGACGC |
| | CATCCTGCTGAGCGATATCCTGAGAGTGAACACCGAGATCACAAAGGCCCCTCT |
| | GAGCGCCTCTATGATCAAGAGATACGACGAGCACCACCAGGATCTGACCCTGCT |
| | GAAGGCCCTCGTTAGACAGCAGCTGCCAGAGAAGTACAAAGAGATTTTCTTCGA |
| | TCAGTCCAAGAACGGCTACGCCGGCTACATTGATGGCGGAGCCAGCCAAGAGGA |
| | ATTCTACAAGTTCATCAAGCCCATCCTGGAAAAGATGGACGGCACCGAGGAACT |
| | GCTGGTCAAGCTGAACAGAGAGGACCTGCTGCGGAAGCAGCGGACCTTCGACAA |
| | TGGCTCTATCCCTCACCAGATCCACCTGGGAGAGCTGCACGCCATTCTGCGGAG |
| | ACAAGAGGACTTTTACCCATTCCTGAAGGACAACCGGGAAAAGATCGAGAAGAT |
| | CCTGACCTTCAGGATCCCCTACTACGTGGGACCACTGGCCAGAGGCAATAGCAG |
| | ATTCGCCTGGATGACCAGAAAGAGCGAGGAAACCATCACACCCTGGAACTTCGA |
| | GGAAGTGGTGGACAAGGGCGCCAGCGCTCAGTCCTTCATCGAGCGGATGACCAA |
| | CTTCGATAAGAACCTGCCTAACGAGAAGGTGCTGCCCAAGCACTCCCTGCTGTA |
| | TGAGTACTTCACCGTGTACAACGAGCTGACCAAAGTGAAATACGTGACCGAGGG |
| | AATGAGAAAGCCCGCCTTTCTGAGCGGCGAGCAGAAAAAGGCCATTGTGGATCT |
| | GCTGTTCAAGACCAACCGGAAAGTGACCGTGAAGCAGCTGAAAGAGGACTACTT |
| | CAAGAAAATCGAGTGCTTCGACAGCGTGGAAATCAGCGGCGTGGAAGATCGGTT |
| | CAATGCCAGCCTGGGCACATACCACGACCTGCTGAAAATTATCAAGGACAAGGA |
| | CTTCCTGGACAACGAAGAGAACGAGGACATTCTCGAGGACATCGTGCTGACCCT |
| | GACACTGTTTGAGGACAGAGAGATGATCGAGGAACGGCTGAAAACATACGCCCA |
| | CCTGTTCGACGACAAAGTGATGAAGCAACTGAAGCGGAGGCGGTACACAGGCTG |
| | GGGCAGACTGTCTCGGAAGCTGATCAACGGCATCCGGGATAAGCAGTCCGGCAA |
| | GACAATCCTGGATTTCCTGAAGTCCGACGGCTTCGCCAACAGAAACTTCATGCA |
| | GCTGATCCACGACGACAGCCTGACCTTTAAAGAGGACATCCAGAAAGCCCAGGT |
| | GTCCGGCCAAGGCGATTCTCTGCACGAGCACATTGCCAACCTGGCCGGATCTCC |
| | CGCCATTAAGAAGGGCATCCTGCAGACAGTGAAGGTGGTGGACGAGCTTGTGAA |
| | AGTGATGGGCAGACACAAGCCCGAGAACATCGTGATCGAAATGGCCAGAGAGAA |
| | CCAGACCACACAGAAGGGCCAGAAGAACAGCCGCGAGAGAATGAAGCGGATCGA |
| | AGAGGGCATCAAAGAGCTGGGCAGCCAGATCCTGAAAGAACACCCCGTGGAAAA |
| | CACCCAGCTGCAGAACGAGAAGCTGTACCTGTACTACCTGCAGAATGGACGGGA |
| | TATGTACGTGGACCAAGAGCTGGACATCAACCGGCTGAGCGACTACGATGTGGA |
| | CCATATCGTGCCCCAGAGCTTTCTGAAGGACGACTCCATCGATAACAAGGTCCT |
| | GACCAGAAGCGACAAGAACCGGGGCAAGAGCGATAACGTGCCCTCCGAAGAGGT |
| | GGTCAAGAAGATGAAGAACTACTGGCGACAGCTGCTGAACGCCAAGCTGATTAC |
| | CCAGCGGAAGTTCGATAACCTGACCAAGGCCGAGAGAGGCGGCCTGAGCGAACT |
| | TGATAAGGCCGGCTTCATTAAGCGGCAGCTGGTGGAAACCCGGCAGATCACCAA |
| | ACACGTGGCACAGATTCTGGACTCCCGGATGAACACTAAGTACGACGAGAATGA |
| | CAAGCTGATCCGGGAAGTGAAAGTCATCACCCTGAAGTCTAAGCTGGTGTCCGA |
| | TTTCCGGAAGGATTTCCAGTTCTACAAAGTGCGGGAAATCAACAACTACCATCA |
| | CGCCCACGACGCCTACCTGAATGCCGTTGTTGGAACAGCCCTGATCAAGAAGTA |
| | TCCCAAGCTGGAAAGCGAGTTCGTGTACGGCGACTACAAGGTGTACGACGTGCG |
| | GAAGATGATCGCCAAGAGCGAACAAGAGATCGGCAAGGCTACCGCCAAGTACTT |
| | TTTCTACAGCAACATCATGAACTTTTTCAAGACAGAGATCACCCTGGCCAACGG |
| | CGAGATCCGGAAAAGACCCCTGATCGAGACAAACGGCGAAACCGGGGAGATCGT |
| | GTGGGATAAGGGCAGAGATTTTGCCACAGTGCGGAAAGTGCTGAGCATGCCCCA |
| | AGTGAATATCGTGAAGAAAACCGAGGTGCAGACAGGCGGCTTCAGCAAAGAGTC |
| | TATCCTGCCTAAGCGGAACAGCGATAAGCTGATCGCCAGAAAGAAGGACTGGGA |
| | CCCCAAGAAATACGGCGGCTTCGTGTCTCCTACCGTGGCCTATTCTGTGCTGGT |
| | GGTGGCCAAAGTGGAAAAGGGCAAGTCCAAAAAGCTCAAGAGCGTGAAAGAGCT |
| | GCTGGGGATCACCATCATGGAAAGAAGCAGCTTTGAGAAGAACCCGATCGACTT |
| | TCTGGAAGCCAAGGGCTACAAAGAAGTCAAGAAGGACCTCATCATCAAGCTCCC |
| | CAAGTACAGCCTGTTCGAGCTGGAAAATGGCCGGAAGCGGATGCTGGCCTCTGC |
| | TAGAGAACTGCAGAAGGGAAACGAGCTGGCCCTGCCTAGCAAATATGTGAACTT |
| | CCTGTACCTGGCCAGCCACTATGAGAAGCTGAAGGGCAGCCCCGAGGACAATGA |
| | GCAAAAGCAGCTGTTTGTGGAACAGCACAAGCACTACCTGGACGAGATCATCGA |
| | GCAGATCAGCGAGTTCTCCAAGAGAGTGATCCTGGCCGACGCTAACCTGGATAA |
| | GGTGCTGTCTGCCTATAACAAGCACCGGGACAAGCCTATCAGAGAGCAGGCCGA |
| | GAATATCATCCACCTGTTTACCCTGACCAACCTGGGAGCCCCTGCCGCCTTCAA |
| | GTACTTCGACACCACCATCGACCGGAAGCAGTACCGGTCCACCAAAGAGGTGCT |
| | GGACGCCACACTGATCCACCAGTCTATCACCGGCCTGTACGAAACCCGGATCGA |
| | CCTGTCTCAGCTCGGCGGCGATTCTGGTGGTTCTGGCGGAAGTGGCGGATCCAC |
| | CAATCTGAGCGACATCATCGAAAAAGAGACAGGCAAGCAGCTCGTGATCCAAGA |
| | ATCCATCCTGATGCTGCCTGAAGAGGTTGAGGAAGTGATCGGCAACAAGCCTGA |
| | GTCCGACATCCTGGTGCACACCGCCTACGATGAGAGCACCGATGAGAACGTCAT |
| | GCTGCTGACAAGCGACGCCCCTGAGTACAAGCCTTGGGCTCTCGTGATTCAGGA |
| | CAGCAATGGGGAGAACAAGATCAAGATGCTGAGCGGAGGTAGCGGAGGCAGTGG |
| | CGGAAGCACAAACCTGTCTGATATCATTGAAAAAGAAACCGGGAAGCAACTGGT |
| | CATTCAAGAGTCCATTCTCATGCTCCCGGAAGAAGTCGAGGAAGTCATTGGAAA |
| | CAAACCCGAGAGCGATATTCTGGTCCACACAGCCTATGACGAGTCTACAGACGA |
| | AAACGTGATGCTCCTGACCTCTGACGCTCCCGAGTATAAGCCCTGGGCACTTGT |
| | TATCCAGGACTCTAACGGGGAAAACAAAATCAAAATGTTGTCCGGCGGCAGCAA |
| | GCGGACAGCCGATGGATCTGAGTTCGAGAGCCCCAAGAAGAAACGGAAGGTGTA |
| | ATAGTGAGCGGCCGCTTAATTAAGCTGCCTTCTGCGGGGCTTGCCTTCTGGCCA |
| | AGCCCTTCTTCTCTCCCTTGCACCTGTACCTCTTGGTCTTTGAATAAAGCCTGA |
| | GTAGGAAG (SEQ ID NO: 645) |
| Amino acid | MTSEKGPSTGDPTLRRRIESWEFDVFYDPRELRKETCLLYEIKWGMSRKIWRSS |
| sequence | GKNTTNHVEVNFIKKFTSERRFHSSISCSITWFLSWSPCWECSQAIREFLSQHP |
| of the | GVTLVIYVARLFWHMDQRNRQGLRDLVNSGVTIQIMRASEYYHCWRNFVNYPPG |
| polypeptide | DEAHWPQYPPLWMMLYALELHCIILSLPPCLKISRRWQNHLAFFRLHLQNCHYQ |
| encoded | TIPPHILLATGLIHPSVTWRSGGSSGGSSGSETPGTSESATPESSGGSSGGSDK |
| by | KYSIGLAIGTNSVGWAVITDEYKVPSKKFKVLGNTDRHSIKKNLIGALLFDSGE |
| mRNA2744 | TAEATRLKRTARRRYTRRKNRICYLQEIFSNEMAKVDDSFFHRLEESFLVEEDK |
| | KHERHPIFGNIVDEVAYHEKYPTIYHLRKKLVDSTDKADLRLIYLALAHMIKFR |
| | GHFLIEGDLNPDNSDVDKLFIQLVQTYNQLFEENPINASGVDAKAILSARLSKS |
| | RRLENLIAQLPGEKKNGLFGNLIALSLGLTPNFKSNFDLAEDAKLQLSKDTYDD |
| | DLDNLLAQIGDQYADLFLAAKNLSDAILLSDILRVNTEITKAPLSASMIKRYDE |
| | HHQDLTLLKALVRQQLPEKYKEIFFDQSKNGYAGYIDGGASQEEFYKFIKPILE |
| | KMDGTEELLVKLNREDLLRKQRTFDNGSIPHQIHLGELHAILRRQEDFYPFLKD |
| | NREKIEKILTFRIPYYVGPLARGNSRFAWMTRKSEETITPWNFEEVVDKGASAQ |
| | SFIERMTNFDKNLPNEKVLPKHSLLYEYFTVYNELTKVKYVTEGMRKPAFLSGE |
| | QKKAIVDLLFKTNRKVTVKQLKEDYFKKIECFDSVEISGVEDRFNASLGTYHDL |
| | LKIIKDKDFLDNEENEDILEDIVLTLTLFEDREMIEERLKTYAHLFDDKVMKQL |
| | KRRRYTGWGRLSRKLINGIRDKQSGKTILDFLKSDGFANRNFMQLIHDDSLTFK |
| | EDIQKAQVSGQGDSLHEHIANLAGSPAIKKGILQTVKVVDELVKVMGRHKPENI |
| | VIEMARENQTTQKGQKNSRERMKRIEEGIKELGSQILKEHPVENTQLQNEKLYL |
| | YYLQNGRDMYVDQELDINRLSDYDVDHIVPQSFLKDDSIDNKVLTRSDKNRGKS |
| | DNVPSEEVVKKMKNYWRQLLNAKLITQRKFDNLTKAERGGLSELDKAGFIKRQL |
| | VETRQITKHVAQILDSRMNTKYDENDKLIREVKVITLKSKLVSDFRKDFQFYKV |
| | REINNYHHAHDAYLNAVVGTALIKKYPKLESEFVYGDYKVYDVRKMIAKSEQEI |
| | GKATAKYFFYSNIMNFFKTEITLANGEIRKRPLIETNGETGEIVWDKGRDFATV |
| | RKVLSMPQVNIVKKTEVQTGGFSKESILPKRNSDKLIARKKDWDPKKYGGFVSP |
| | TVAYSVLVVAKVEKGKSKKLKSVKELLGITIMERSSFEKNPIDFLEAKGYKEVK |
| | KDLIIKLPKYSLFELENGRKRMLASARELQKGNELALPSKYVNFLYLASHYEKL |
| | KGSPEDNEQKQLFVEQHKHYLDEIIEQISEFSKRVILADANLDKVLSAYNKHRD |
| | KPIREQAENIIHLFTLTNLGAPAAFKYFDTTIDRKQYRSTKEVLDATLIHQSIT |
| | GLYETRIDLSQLGGDSGGSGGSGGSTNLSDIIEKETGKQLVIQESILMLPEEVE |
| | EVIGNKPESDILVHTAYDESTDENVMLLTSDAPEYKPWALVIQDSNGENKIKML |
| | SGGSGGSGGSTNLSDIIEKETGKQLVIQESILMLPEEVEEVIGNKPESDILVHT |
| | AYDESTDENVMLLTSDAPEYKPWALVIQDSNGENKIKMLSGGSKRTADGSEFES |
| | PKKKRKV (SEQ ID NO: 646) |
| Nucleotide | ATCAAATGAAACTGCAATTTATTCATATCAGGATTATCAATACCATATTTTTGA |
| sequence | AAAAGCCGTTTCTGTAATGAAGGAGAAAACTCACCGAGGCAGTTCCATAGGATG |
| of a | GCAAGATCCTGGTATCGGTCTGCGATTCCGACTCGTCCAACATCAATACAACCT |
| plasmid | ATTAATTTCCCCTCGTCAAAAATAAGGTTATCAAGTGAGAAATCACCATGAGTG |
| encoding | ACGACTGAATCCGGTGAGAATGGCAAAAGTTTATGCATTTCTTTCCAGACTTGT |
| mRNA2745 | TCAACAGGCCAGCCATTACGCTCGTCATCAAAATCACTCGCATCAACCAAACCG |
| | TTATTCATTCGTGATTGCGCCTGAGCGAGACGAAATACGCGATCGCTGTTAAAA |
| | GGACAATTACAAACAGGAATCGAATGCAACCGGCGCAGGAACACTGCCAGCGCA |
| | TCAACAATATTTTCACCTGAATCAGGATATTCTTCTAATACCTGGAATGCTGTT |
| | TTCCCAGGGATCGCAGTGGTGAGTAACCATGCATCATCAGGAGTACGGATAAAA |
| | TGCTTGATGGTCGGAAGAGGCATAAATTCCGTCAGCCAGTTTAGTCTGACCATC |
| | TCATCTGTAACATCATTGGCAACGCTACCTTTGCCATGTTTCAGAAACAACTCT |
| | GGCGCATCGGGCTTCCCATACAATCGATAGATTGTCGCACCTGATTGCCCGACA |
| | TTATCGCGAGCCCATTTATACCCATATAAATCAGCATCCATGTTGGAATTTAAT |
| | CGCGGCCTAGAGCAAGACGTTTCCCGTTGAATATGGCTCATACTCTTCCTTTTT |
| | CAATATTATTGAAGCATTTATCAGGGTTATTGTCTCATGAGCGGATACATATTT |
| | GAATGTATTTAGAAAAATAAACAAATAGGGGTTCCGCGCACATTTCCCCGAAAA |
| | GTGCCACCTGACGTCTAAGAAACCATTATTATCATGACATTAACCTATAAAAAT |
| | AGGCGTATCACGAGGCCCTTTCGTCTCGCGCGTTTCGGTGATGACGGTGAAAAC |
| | CTCTGACACATGCAGCTCCCGGAGACGGTCACAGCTTGTCTGTAAGCGGATGCC |
| | GGGAGCAGACAAGCCCGTCAGGGCGCGTCAGCGGGTGTTGGCGGGTGTCGGGGC |
| | TGGCTTAACTATGCGGCATCAGAGCAGATTGTACTGAGAGTGCACCATATGCGG |
| | TGTGAAATACCGCACAGATGCGTAAGGAGAAAATACCGCATCAGGCGCCATTCG |
| | CCATTCAGGCTGCGCAACTGTTGGGAAGGGCGATCGGTGCGGGCCTCTTCGCTA |
| | TTACGCCAGCTGGCGAAAGGGGGATGTGCTGCAAGGCGATTAAGTTGGGTAACG |
| | CCAGGGTTTTCCCAGTCACGACGTTGTAAAACGACGGCCAGTGAATTGACGCGT |
| | ATTGGGATCGAGCTCGGTACCTAATACGACACACTATAAGGAAATAAGAGAGAA |
| | AAGAAGAGTAAGAAGAAATATAAGAGCCACCATGACCTCTGAGAAGGGCCCTAG |
| | CACAGGCGACCCCACCCTGCGGCGGAGAATCGAGAGCTGGGAGTTCGACGTGTT |
| | CTACGACCCTAGAGAACTGAGAAAGGAAACCTGCCTGCTGTACGAGATCAAGTG |
| | GGGCATGAGCAGAAAGATCTGGCGGAGCTCTGGCAAGAACACCACCAACCACGT |
| | GGAAGTGAATTTCATCAAGAAGTTCACCAGCGAGAGAAGGTTCCACAGCAGCAT |
| | CAGCTGCAGCATCACCTGGTTCCTGAGCTGGTCCCCTTGCTGGGAATGCAGCCA |
| | GGCCATCAGAGAGTTCCTGAGCCAACACCCCGGAGTGACACTGGTGATCTACGT |
| | GGCCAGACTGTTCTGGCACATGGACCAGAGAAACAGACAGGGCCTGAGAGATCT |
| | GGTCAACAGCGGCGTGACTATCCAGATCATGCGGGCCAGCGAGTACTACCACTG |
| | TTGGCGGAACTTCGTGAACTACCCCCCCGGCGATGAGGCCCACTGGCCTCAGTA |
| | CCCTCCTCTGTGGATGATGCTGTACGCCCTGGAACTGCACTGCATCATCCTGTC |
| | TCTGCCTCCATGTCTGAAGATCTCTAGAAGATGGCAGAACCACCTGGCCTTCTT |
| | CAGACTGCACCTGCAGAATTGCCACTACCAGACCATCCCCCCCCACATCCTGCT |
| | GGCTACAGGCCTGATCCACCCTTCTGTGACCTGGAGAAGCGGAGGATCTAGCGG |
| | CGGCTCTAGCGGATCTGAGACACCTGGCACAAGCGAGTCTGCCACACCTGAGAG |
| | TAGCGGCGGATCTTCTGGCGGCTCCGGCAAGAGAAATTACATCCTCGGACTGGC |
| | CATCGGCATCACCTCTGTCGGCTACGGCATCATCGACTACGAGACACGGGACGT |
| | GATCGATGCCGGCGTGCGGCTGTTTAAAGAGGCCAACGTCGAGAACAACGAGGG |
| | CCGCAGATCTAAGAGAGGCGCCAGACGGCTGAAGAGAAGAAGAAGGCACCGGAT |
| | CCAGAGAGTGAAGAAGCTGCTGTTCGACTACAACCTGCTGACCGACCACAGCGA |
| | GCTGAGCGGCATCAATCCTTACGAGGCCAGAGTGAAGGGCCTGAGCCAGAAGCT |
| | GAGCGAGGAAGAGTTTAGCGCTGCCCTGCTGCACCTGGCCAAGAGAAGAGGCGT |
| | GCACAACGTGAACGAGGTGGAAGAGGACACCGGCAACGAGCTGTCCACCAAAGA |
| | GCAGATCAGCCGGAACAGCAAGGCCCTGGAAGAGAAATACGTGGCCGAACTGCA |
| | GCTGGAACGGCTGAAAAAGGATGGCGAAGTGCGGGGCAGCATCAACCGGTTCAA |
| | GACCAGCGACTACGTGAAAGAAGCCAAACAGCTGCTGAAGGTGCAGAAGGCCTA |
| | CCACCAGCTGGACCAGAGCTTCATCGACACCTACATCGACCTGCTGGAAACCCG |
| | GCGGACCTACTATGAAGGACCTGGCGAGGGAAGCCCCTTCGGCTGGAAGGACAT |
| | CAAAGAATGGTACGAGATGCTGATGGGCCACTGCACCTACTTTCCCGAGGAACT |
| | GCGGAGCGTGAAGTACGCCTACAACGCCGACCTGTACAACGCCCTGAACGACCT |
| | GAACAACCTCGTGATCACCCGGGACGAGAACGAGAAGCTGGAATATTACGAGAA |
| | GTTCCAAATCATCGAGAACGTGTTCAAGCAGAAGAAAAAGCCCACGCTGAAGCA |
| | GATCGCCAAAGAGATCCTGGTCAACGAGGAAGATATCAAGGGCTACAGAGTGAC |
| | CAGCACCGGCAAGCCCGAGTTCACCAACCTGAAGGTGTACCACGACATCAAGGA |
| | TATCACAGCCCGGAAAGAAATCATTGAGAATGCCGAGCTGCTCGACCAGATTGC |
| | CAAGATCCTGACCATCTACCAGAGCAGCGAGGACATCCAAGAGGAACTGACCAA |
| | TCTGAACTCCGAGCTGACCCAAGAAGAGATCGAACAGATCAGCAATCTGAAGGG |
| | GTACACCGGCACACACAACCTGAGCCTGAAGGCCATCAACCTGATCCTGGACGA |
| | GCTGTGGCACACCAACGACAACCAGATCGCTATCTTCAACCGGCTGAAGCTGGT |
| | GCCCAAGAAGGTGGACCTGTCTCAGCAGAAAGAGATTCCCACCACACTGGTGGA |
| | CGACTTCATTCTGAGCCCCGTGGTCAAGAGAAGCTTCATCCAGAGCATCAAAGT |
| | GATCAACGCCATCATCAAGAAGTACGGGCTGCCCAACGATATCATCATCGAGCT |
| | GGCCCGCGAGAAGAACTCCAAGGACGCCCAGAAAATGATCAACGAGATGCAGAA |
| | GCGGAACCGGCAGACCAACGAGCGGATCGAGGAAATCATCCGGACCACCGGCAA |
| | AGAGAACGCCAAGTACCTGATCGAGAAGATCAAGCTGCACGACATGCAAGAGGG |
| | CAAGTGCCTGTACAGCCTGGAAGCCATTCCTCTGGAAGATCTGCTGAACAATCC |
| | CTTCAACTATGAGGTGGACCACATCATCCCCAGAAGCGTGTCCTTCGACAACAG |
| | CTTCAACAACAAGGTGCTCGTGAAGCAAGAGGAAAACAGCAAGAAGGGCAACAG |
| | AACCCCATTCCAGTACCTGAGCAGCTCCGACAGCAAGATCAGCTACGAAACCTT |
| | CAAGAAGCACATCCTGAATCTGGCCAAAGGCAAGGGCAGAATCAGCAAGACCAA |
| | GAAAGAGTATCTGCTCGAGGAACGGGACATCAACAGATTCAGCGTGCAGAAAGA |
| | CTTCATCAATCGGAACCTGGTGGACACCAGATACGCCACCAGAGGCCTGATGAA |
| | TCTGCTGCGGAGCTACTTCAGAGTGAACAATCTGGACGTGAAAGTCAAGTCCAT |
| | CAACGGCGGCTTCACCAGCTTTCTGCGGCGGAAGTGGAAGTTTAAGAAAGAGCG |
| | GAACAAGGGCTATAAGCACCATGCCGAGGACGCCCTGATCATTGCCAACGCCGA |
| | TTTCATCTTCAAAGAGTGGAAGAAACTGGACAAGGCCAAAAAAGTGATGGAAAA |
| | CCAGATGTTCGAGGAAAAGCAGGCCGAGAGCATGCCCGAGATCGAGACTGAGCA |
| | AGAGTACAAAGAGATTTTCATCACGCCCCACCAGATCAAGCACATTAAGGACTT |
| | CAAGGACTACAAGTACAGCCACCGCGTGGACAAGAAGCCCAATAGAGAGCTGAT |
| | TAACGACACCCTGTACTCTACCCGGAAGGACGACAAGGGCAATACCCTGATCGT |
| | CAACAACCTGAACGGCCTGTACGACAAGGACAACGACAAGCTCAAGAAGCTGAT |
| | CAACAAGAGCCCCGAGAAACTGCTGATGTACCATCACGACCCTCAGACCTACCA |
| | GAAACTGAAGCTGATTATGGAACAGTACGGCGACGAGAAAAACCCGCTGTACAA |
| | GTACTACGAGGAAACCGGAAACTACCTGACCAAGTACTCCAAAAAGGACAATGG |
| | GCCCGTGATCAAGAAGATTAAGTATTACGGCAACAAGCTGAATGCCCACCTGGA |
| | CATCACCGACGACTACCCCAACAGCAGAAACAAGGTGGTCAAGCTGTCCCTGAA |
| | GCCTTACAGATTCGACGTGTACCTGGACAACGGCGTGTACAAGTTCGTGACCGT |
| | GAAGAACCTGGACGTCATCAAAAAAGAAAACTACTACGAAGTCAACAGCAAGTG |
| | CTATGAGGAAGCCAAGAAACTCAAGAAAATCAGCAACCAGGCCGAGTTTATCGC |
| | CTCCTTCTACAACAACGATCTGATCAAGATCAACGGGGAGCTGTATCGCGTGAT |
| | CGGCGTCAACAATGACCTGCTGAACCGGATCGAAGTGAACATGATCGACATCAC |
| | CTACCGCGAGTACCTCGAGAACATGAACGATAAGCGGCCTCCACGGATCATTAA |
| | GACAATCGCCAGCAAGACGCAGAGCATTAAGAAGTACAGCACAGACATCCTGGG |
| | GAACCTGTACGAAGTGAAGTCCAAAAAGCACCCGCAGATTATCAAGAAAGGCGG |
| | CAGCCCCAAGAAAAAAAGAAAGGTTTCCTCCGACTACAAGGACCACGATGGCGA |
| | TTATAAGGATCACGACATCGATTACAAGGACGATGACGACAAGAGCGGCGGCAG |
| | CGGTGGATCTGGCGGAAGCACAAATCTGAGCGACATCATCGAAAAAGAGACAGG |
| | CAAGCAGCTCGTGATCCAAGAGTCCATCCTGATGCTCCCTGAAGAGGTCGAGGA |
| | AGTGATCGGCAACAAACCCGAGAGCGATATCCTGGTGCACACCGCCTACGACGA |
| | GAGCACCGACGAGAATGTCATGCTGCTGACAAGCGACGCCCCTGAGTACAAGCC |
| | TTGGGCTCTCGTGATTCAGGACAGCAATGGCGAGAACAAGATCAAGATGCTGTC |
| | CGGAGGAAGCGGAGGTAGCGGAGGGTCTACCAACCTGTCCGACATTATTGAGAA |
| | AGAAACCGGGAAGCAGCTGGTCATTCAAGAAAGTATCCTCATGTTGCCCGAAGA |
| | GGTTGAAGAAGTCATTGGGAACAAGCCTGAGTCCGACATCCTCGTGCATACAGC |
| | CTATGATGAGTCCACCGATGAGAACGTGATGCTCCTCACCTCTGATGCCCCAGA |
| | GTATAAGCCCTGGGCACTTGTCATCCAGGACTCTAACGGGGAAAACAAAATCAA |
| | AATGCTCTCCGGCGGCAGCAAGCGGACAGCCGATGGATCTGAGTTCGAGAGCCC |
| | CAAGAAGAAACGGAAGGTGTAATAGTGAGCGGCCGCTTAATTAAGCTGCCTTCT |
| | GCGGGGCTTGCCTTCTGGCCAAGCCCTTCTTCTCTCCCTTGCACCTGTACCTCT |
| | TGGTCTTTGAATAAAGCCTGAGTAGGAAGTCTAGAGTTTAAACATTTAAATCTG |
| | CAGATCCCAATGGCGCGCCGAGCTTGGCTCGAGCATGGTCATAGCTGTTTCCTG |
| | TGTGAAATTGTTATCCGCTCACAATTCCACACAACATACGAGCCGGAAGCATAA |
| | AGTGTAAAGCCTGGGGTGCCTAATGAGTGAGCTAACTCACATTAATTGCGTTGC |
| | GCTCACTGCCCGCTTTCCAGTCGGGAAACCTGTCGTGCCAGCTGCATTAATGAA |
| | TCGGCCAACGCGCGGGGAGAGGCGGTTTGCGTATTGGGCACTCTTGCGCTTCCT |
| | CGCTCACTGACTCGCTGCGCTCGGTCGTTCGGCTGCGGCGAGCGGTATCAGCTC |
| | ACTCAAAGGCGGTAATACGGTTATCCACAGAATCAGGGGATAACGCAGGAAAGA |
| | ACATGTGAGCAAAAGGCCAGCAAAAGGCCAGGAACCGTAAAAAGGCCGCGTTGC |
| | TGGCGTTTTTCCATAGGCTCCGCCCCCCTGACGAGCATCACAAAAATCGACGCT |
| | CAAGTCAGAGGTGGCGAAACCCGACAGGACTATAAAGATACCAGGCGTTTCCCC |
| | CTGGAAGCTCCCTCGTGCGCTCTCCTGTTCCGACCCTGCCGCTTACCGGATACC |
| | TGTCCGCCTTTCTCCCTTCGGGAAGCGTGGCGCTTTCTCATAGCTCACGCTGTA |
| | GGTATCTCAGTTCGGTGTAGGTCGTTCGCTCCAAGCTGGGCTGTGTGCACGAAC |
| | CCCCCGTTCAGCCCGACCGCTGCGCCTTATCCGGTAACTATCGTCTTGAGTCCA |
| | ACCCGGTAAGACACGACTTATCGCCACTGGCAGCAGCCACTGGTAACAGGATTA |
| | GCAGAGCGAGGTATGTAGGCGGTGCTACAGAGTTCTTGAAGTGGTGGCCTAACT |
| | ACGGCTACACTAGAAGAACAGTATTTGGTATCTGCGCTCTGCTGAAGCCAGTTA |
| | CCTTCGGAAAAAGAGTTGGTAGCTCTTGATCCGGCAAACAAACCACCGCTGGTA |
| | GCGGTGGTTTTTTTGTTTGCAAGCAGCAGATTACGCGCAGAAAAAAAGGATCTC |
| | AAGAAGATCCTTTGATCTTTTCTACGGGGTCTGACGCTCAGTGGAACGAAAACT |
| | CACGTTAAGGGATTTTGGTCATGAGATTATCAAAAAGGATCTTCACCTAGATCC |
| | TTTTAAATTAAAAATGAAGTTTTAAATCAATCTAAAGTATATATGAGTAAACTT |
| | GGTCTGACAGTTAGAAAAACTCATCGAGC (SEQ ID NO: 647) |
| Amino acid | MTSEKGPSTGDPTLRRRIESWEFDVFYDPRELRKETCLLYEIKWGMSRKIWRSS |
| sequence | GKNTTNHVEVNFIKKFTSERRFHSSISCSITWFLSWSPCWECSQAIREFLSQHP |
| of the | GVTLVIYVARLFWHMDQRNRQGLRDLVNSGVTIQIMRASEYYHCWRNFVNYPPG |
| polypeptide | DEAHWPQYPPLWMMLYALELHCIILSLPPCLKISRRWQNHLAFFRLHLQNCHYQ |
| encoded | TIPPHILLATGLIHPSVTWRSGGSSGGSSGSETPGTSESATPESSGGSSGGSGK |
| by | RNYILGLAIGITSVGYGIIDYETRDVIDAGVRLFKEANVENNEGRRSKRGARRL |
| mRNA2745 | KRRRRHRIQRVKKLLFDYNLLTDHSELSGINPYEARVKGLSQKLSEEEFSAALL |
| | HLAKRRGVHNVNEVEEDTGNELSTKEQISRNSKALEEKYVAELQLERLKKDGEV |
| | RGSINRFKTSDYVKEAKQLLKVQKAYHQLDQSFIDTYIDLLETRRTYYEGPGEG |
| | SPFGWKDIKEWYEMLMGHCTYFPEELRSVKYAYNADLYNALNDLNNLVITRDEN |
| | EKLEYYEKFQIIENVFKQKKKPTLKQIAKEILVNEEDIKGYRVTSTGKPEFTNL |
| | KVYHDIKDITARKEIIENAELLDQIAKILTIYQSSEDIQEELTNLNSELTQEEI |
| | EQISNLKGYTGTHNLSLKAINLILDELWHTNDNQIAIFNRLKLVPKKVDLSQQK |
| | EIPTTLVDDFILSPVVKRSFIQSIKVINAIIKKYGLPNDIIIELAREKNSKDAQ |
| | KMINEMQKRNRQTNERIEEIIRTTGKENAKYLIEKIKLHDMQEGKCLYSLEAIP |
| | LEDLLNNPFNYEVDHIIPRSVSFDNSFNNKVLVKQEENSKKGNRTPFQYLSSSD |
| | SKISYETFKKHILNLAKGKGRISKTKKEYLLEERDINRFSVQKDFINRNLVDTR |
| | YATRGLMNLLRSYFRVNNLDVKVKSINGGFTSFLRRKWKFKKERNKGYKHHAED |
| | ALIIANADFIFKEWKKLDKAKKVMENQMFEEKQAESMPEIETEQEYKEIFITPH |
| | QIKHIKDFKDYKYSHRVDKKPNRELINDTLYSTRKDDKGNTLIVNNLNGLYDKD |
| | NDKLKKLINKSPEKLLMYHHDPQTYQKLKLIMEQYGDEKNPLYKYYEETGNYLT |
| | KYSKKDNGPVIKKIKYYGNKLNAHLDITDDYPNSRNKVVKLSLKPYRFDVYLDN |
| | GVYKFVTVKNLDVIKKENYYEVNSKCYEEAKKLKKISNQAEFIASFYNNDLIKI |
| | NGELYRVIGVNNDLLNRIEVNMIDITYREYLENMNDKRPPRIIKTIASKTQSIK |
| | KYSTDILGNLYEVKSKKHPQIIKKGGSPKKKRKVSSDYKDHDGDYKDHDIDYKD |
| | DDDKSGGSGGSGGSTNLSDIIEKETGKQLVIQESILMLPEEVEEVIGNKPESDI |
| | LVHTAYDESTDENVMLLTSDAPEYKPWALVIQDSNGENKIKMLSGGSGGSGGST |
| | NLSDIIEKETGKQLVIQESILMLPEEVEEVIGNKPESDILVHTAYDESTDENVM |
| | LLTSDAPEYKPWALVIQDSNGENKIKMLSGGSKRTADGSEFESPKKKRKV |
| | (SEQ ID NO: 648) |
| Nucleotide | ATCAAATGAAACTGCAATTTATTCATATCAGGATTATCAATACCATATTTTTGA |
| sequence | AAAAGCCGTTTCTGTAATGAAGGAGAAAACTCACCGAGGCAGTTCCATAGGATG |
| of a | GCAAGATCCTGGTATCGGTCTGCGATTCCGACTCGTCCAACATCAATACAACCT |
| plasmid | ATTAATTTCCCCTCGTCAAAAATAAGGTTATCAAGTGAGAAATCACCATGAGTG |
| encoding | ACGACTGAATCCGGTGAGAATGGCAAAAGTTTATGCATTTCTTTCCAGACTTGT |
| mRNA2926 | TCAACAGGCCAGCCATTACGCTCGTCATCAAAATCACTCGCATCAACCAAACCG |
| | TTATTCATTCGTGATTGCGCCTGAGCGAGACGAAATACGCGATCGCTGTTAAAA |
| | GGACAATTACAAACAGGAATCGAATGCAACCGGCGCAGGAACACTGCCAGCGCA |
| | TCAACAATATTTTCACCTGAATCAGGATATTCTTCTAATACCTGGAATGCTGTT |
| | TTCCCAGGGATCGCAGTGGTGAGTAACCATGCATCATCAGGAGTACGGATAAAA |
| | TGCTTGATGGTCGGAAGAGGCATAAATTCCGTCAGCCAGTTTAGTCTGACCATC |
| | TCATCTGTAACATCATTGGCAACGCTACCTTTGCCATGTTTCAGAAACAACTCT |
| | GGCGCATCGGGCTTCCCATACAATCGATAGATTGTCGCACCTGATTGCCCGACA |
| | TTATCGCGAGCCCATTTATACCCATATAAATCAGCATCCATGTTGGAATTTAAT |
| | CGCGGCCTAGAGCAAGACGTTTCCCGTTGAATATGGCTCATACTCTTCCTTTTT |
| | CAATATTATTGAAGCATTTATCAGGGTTATTGTCTCATGAGCGGATACATATTT |
| | GAATGTATTTAGAAAAATAAACAAATAGGGGTTCCGCGCACATTTCCCCGAAAA |
| | GTGCCACCTGACGTCTAAGAAACCATTATTATCATGACATTAACCTATAAAAAT |
| | AGGCGTATCACGAGGCCCTTTCGTCTCGCGCGTTTCGGTGATGACGGTGAAAAC |
| | CTCTGACACATGCAGCTCCCGGAGACGGTCACAGCTTGTCTGTAAGCGGATGCC |
| | GGGAGCAGACAAGCCCGTCAGGGCGCGTCAGCGGGTGTTGGCGGGTGTCGGGGC |
| | TGGCTTAACTATGCGGCATCAGAGCAGATTGTACTGAGAGTGCACCATATGCGG |
| | TGTGAAATACCGCACAGATGCGTAAGGAGAAAATACCGCATCAGGCGCCATTCG |
| | CCATTCAGGCTGCGCAACTGTTGGGAAGGGCGATCGGTGCGGGCCTCTTCGCTA |
| | TTACGCCAGCTGGCGAAAGGGGGATGTGCTGCAAGGCGATTAAGTTGGGTAACG |
| | CCAGGGTTTTCCCAGTCACGACGTTGTAAAACGACGGCCAGTGAATTGACGCGT |
| | ATTGGGATCGAGCTCGGTACCTAATACGACACACTATAAGGAAATAAGAGAGAA |
| | AAGAAGAGTAAGAAGAAATATAAGAGCCACCATGAGCGAGGTCGAGTTCTCTCA |
| | CGAATATTGGATGAGACACGCTCTCACCCTGGCTAAGAGAGCCAGGGACGAAAG |
| | AGAGGTGCCAGTTGGCGCTGTCCTGGTGTTGAACAATCGCGTCATCGGAGAAGG |
| | ATGGAATCGCGCCATTGGCCTGCACGATCCAACCGCACATGCCGAAATTATGGC |
| | TCTGCGGCAAGGCGGCCTCGTGATGCAAAATTACAGACTGTACGATGCTACCCT |
| | CTACTCCACCTTCGAGCCCTGTGTCATGTGTGCTGGGGCAATGATTCACTCCCG |
| | GATTGGCCGCGTGGTGTTTGGAGTGCGGAATGCCAAGACTGGCGCCGCTGGATC |
| | TCTGATGGACGTCCTGCACCATCCTGGGATGAACCACCGGGTCGAGATCACAGA |
| | GGGAATTCTGGCTGACGAGTGCGCTGCCCTGCTGTGCAGGTTCTTTAGAATGCC |
| | TAGAAGGGTGTTCAACGCCCAGAAAAAAGCTCAGAGCAGCACCGATTCCGGCGG |
| | AAGCAGCGGAGGATCTTCTGGAAGCGAAACCCCAGGCACCAGCGAGTCTGCCAC |
| | ACCAGAATCATCTGGCGGTAGCTCCGGCGGCAGCGACAAGAAGTATTCTATCGG |
| | ACTGGCCATCGGCACCAACTCTGTTGGATGGGCCGTGATCACCGACGAGTACAA |
| | GGTGCCCAGCAAGAAATTCAAGGTGCTGGGCAACACCGACAGGCACAGCATCAA |
| | GAAGAACCTGATCGGCGCACTGCTGTTCGACTCTGGCGAAACAGCCGAGGCCAC |
| | CAGACTGAAGAGAACAGCCCGCAGACGGTACACCAGAAGAAAGAACCGGATCTG |
| | CTACCTCCAAGAGATCTTCAGCAACGAGATGGCCAAGGTGGACGACAGCTTCTT |
| | CCACAGACTGGAAGAGTCCTTCCTGGTGGAAGAGGACAAGAAGCACGAGAGACA |
| | CCCCATCTTCGGCAACATCGTGGACGAGGTGGCCTACCACGAGAAGTACCCCAC |
| | CATCTACCACCTGAGAAAGAAACTGGTGGACAGCACCGACAAGGCCGACCTGAG |
| | ACTGATCTATCTGGCCCTGGCTCACATGATCAAGTTCCGGGGCCACTTCCTGAT |
| | CGAGGGCGACCTGAATCCTGACAACAGCGACGTGGACAAGCTGTTCATCCAGCT |
| | GGTGCAGACCTACAACCAGCTGTTCGAGGAAAACCCCATCAACGCCAGCGGAGT |
| | GGATGCCAAGGCCATCCTGTCTGCCAGACTGAGCAAGAGCAGACGGCTGGAAAA |
| | TCTGATCGCCCAGCTGCCTGGCGAGAAGAAGAATGGCCTGTTCGGCAACCTGAT |
| | TGCCCTGAGCCTGGGCCTGACACCTAACTTCAAGAGCAACTTCGACCTGGCCGA |
| | GGACGCCAAACTGCAGCTGAGCAAGGACACCTACGACGACGACCTGGACAATCT |
| | GCTGGCCCAGATCGGCGATCAGTACGCCGACTTGTTTCTGGCCGCCAAGAATCT |
| | GAGCGACGCCATCCTGCTGTCCGACATCCTGAGAGTGAACACCGAGATCACCAA |
| | GGCACCTCTGAGCGCCTCTATGATCAAGAGATACGACGAGCACCACCAGGATCT |
| | GACCCTGCTGAAGGCCCTCGTTAGACAGCAGCTGCCAGAGAAGTACAAAGAGAT |
| | TTTCTTCGACCAGAGCAAGAACGGCTACGCCGGCTACATTGATGGCGGAGCCAG |
| | CCAAGAGGAATTCTACAAGTTCATCAAGCCCATCCTCGAGAAGATGGACGGCAC |
| | CGAGGAACTGCTGGTCAAGCTGAACAGAGAGGACCTGCTGAGAAAGCAGAGAAC |
| | CTTCGACAACGGCAGCATCCCTCACCAGATCCACCTGGGAGAACTGCACGCCAT |
| | TCTGCGGAGACAAGAGGACTTTTACCCATTCCTGAAGGACAACCGGGAAAAGAT |
| | CGAGAAAATCCTGACCTTCAGGATCCCCTACTACGTGGGACCACTGGCCAGAGG |
| | CAATAGCAGATTCGCCTGGATGACCAGAAAGAGCGAGGAAACCATCACTCCCTG |
| | GAACTTCGAGGAAGTGGTGGACAAGGGCGCCAGCGCTCAGTCCTTCATCGAGCG |
| | GATGACCAACTTCGATAAGAACCTGCCTAACGAGAAGGTGCTGCCCAAGCACAG |
| | CCTGCTGTACGAGTACTTCACCGTGTACAACGAGCTGACCAAAGTGAAATACGT |
| | GACCGAGGGAATGAGAAAGCCCGCCTTTCTGAGCGGCGAGCAGAAAAAGGCCAT |
| | CGTGGATCTGCTGTTCAAGACCAACCGGAAAGTGACCGTGAAGCAGCTGAAAGA |
| | GGACTACTTCAAGAAAATCGAGTGCTTCGACAGCGTCGAGATCTCCGGCGTGGA |
| | AGATCGGTTCAATGCCAGCCTGGGCACATACCACGATCTGCTGAAAATTATCAA |
| | GGACAAGGACTTCCTGGACAACGAAGAGAACGAGGACATCCTTGAGGACATCGT |
| | GCTGACACTGACCCTGTTTGAGGACAGAGAGATGATCGAGGAACGGCTGAAAAC |
| | ATACGCCCACCTGTTCGACGACAAAGTGATGAAGCAACTGAAGCGGCGGAGATA |
| | CACCGGCTGGGGCAGACTGTCTCGGAAGCTGATCAACGGCATCCGGGATAAGCA |
| | GTCCGGCAAGACCATCCTGGACTTTCTGAAGTCCGACGGCTTCGCCAACAGAAA |
| | CTTCATGCAGCTGATTCACGACGACAGCCTCACCTTCAAAGAGGATATCCAGAA |
| | AGCCCAGGTGTCCGGCCAGGGCGATTCTCTGCATGAGCACATTGCCAACCTGGC |
| | CGGCTCTCCCGCCATTAAGAAAGGCATCCTGCAGACAGTGAAGGTGGTGGACGA |
| | GCTTGTGAAAGTGATGGGCAGACACAAGCCCGAGAACATCGTGATCGAAATGGC |
| | CAGAGAGAACCAGACCACACAGAAGGGACAGAAGAACAGCCGCGAGAGAATGAA |
| | GCGGATCGAAGAGGGCATCAAAGAGCTGGGCAGCCAGATCCTGAAAGAACACCC |
| | CGTGGAAAACACCCAGCTGCAGAACGAGAAGCTGTACCTGTACTACCTGCAGAA |
| | TGGACGGGATATGTACGTGGACCAAGAGCTGGACATCAACAGACTGTCCGACTA |
| | CGATGTGGACCATATCGTGCCCCAGTCTTTTCTGAAGGACGACTCCATCGACAA |
| | CAAGGTCCTGACCAGATCCGACAAGAATCGGGGCAAGAGCGACAACGTGCCCTC |
| | CGAAGAGGTGGTCAAGAAGATGAAGAACTACTGGCGACAGCTGCTGAACGCCAA |
| | GCTGATTACCCAGCGGAAGTTCGACAATCTGACCAAGGCCGAAAGAGGCGGCCT |
| | GAGCGAACTGGATAAGGCCGGCTTCATCAAGAGACAGCTGGTGGAAACCCGGCA |
| | GATCACAAAGCACGTGGCACAGATTCTGGACTCTCGGATGAACACTAAGTACGA |
| | CGAGAACGACAAACTGATCCGCGAAGTGAAAGTCATCACCCTGAAGTCCAAGCT |
| | GGTGTCCGATTTCCGGAAGGATTTCCAGTTCTACAAAGTGCGCGAGATCAACAA |
| | CTACCATCACGCCCACGACGCCTACCTGAATGCCGTTGTTGGAACAGCCCTGAT |
| | CAAAAAGTACCCTAAGCTGGAAAGCGAGTTCGTGTACGGCGACTACAAGGTGTA |
| | CGACGTGCGGAAGATGATCGCCAAGAGCGAGCAAGAGATTGGCAAGGCAACCGC |
| | CAAGTACTTCTTCTACAGCAACATCATGAACTTTTTCAAGACAGAGATCACCCT |
| | CGCCAACGGCGAGATCAGAAAGCGGCCTCTGATCGAGACAAACGGCGAAACCGG |
| | CGAGATTGTGTGGGATAAGGGCAGAGACTTTGCCACAGTGCGGAAAGTGCTGAG |
| | CATGCCCCAAGTGAATATCGTGAAGAAAACCGAGGTGCAGACAGGCGGCTTCAG |
| | CAAAGAGTCTATCCTGCCTAAGCGGAACTCCGACAAGCTGATCGCCAGAAAGAA |
| | GGACTGGGACCCCAAGAAGTACGGCGGCTTCGATTCTCCTACCGTGGCCTATAG |
| | CGTGCTGGTGGTGGCCAAAGTGGAAAAGGGCAAGTCCAAGAAACTCAAGAGCGT |
| | GAAAGAGCTGCTGGGGATCACCATCATGGAAAGAAGCAGCTTCGAGAAGAATCC |
| | GATCGATTTCCTCGAGGCCAAGGGCTACAAAGAAGTGAAAAAGGACCTGATCAT |
| | CAAGCTCCCCAAGTACTCCCTGTTCGAGCTGGAAAACGGCCGGAAGAGAATGCT |
| | GGCCTCTGCTGGCGAACTGCAGAAGGGAAACGAACTGGCCCTGCCTAGCAAATA |
| | TGTGAACTTCCTGTACCTGGCCAGCCACTATGAGAAGCTGAAGGGCAGCCCCGA |
| | GGACAATGAGCAAAAGCAGCTGTTTGTGGAACAGCACAAGCACTACCTGGACGA |
| | GATCATCGAGCAGATCAGCGAGTTTAGCAAGAGAGTGATTCTGGCCGACGCCAA |
| | TCTGGACAAAGTGCTGTCCGCCTACAACAAGCACCGGGACAAGCCTATCAGAGA |
| | GCAGGCCGAGAATATCATCCACCTGTTTACCCTGACCAACCTGGGAGCCCCTGC |
| | CGCCTTCAAGTACTTTGACACCACCATCGACCGGAAGCGGTACACCTCCACCAA |
| | AGAGGTGCTGGACGCCACTCTGATCCACCAGTCTATCACCGGCCTGTACGAGAC |
| | ACGGATCGACCTGTCTCAACTCGGAGGCGACGAAGGCGCCGATAAGAGAACCGC |
| | CGATGGCTCTGAGTTCGAGAGCCCCAAGAAAAAGCGCAAAGTGTAATAGTGAGC |
| | GGCCGCTTAATTAAGCTGCCTTCTGCGGGGCTTGCCTTCTGGCCAAGCCCTTCT |
| | TCTCTCCCTTGCACCTGTACCTCTTGGTCTTTGAATAAAGCCTGAGTAGGAAGT |
| | CTAGAGTTTAAACATTTAAATCTGCAGATCCCAATGGCGCGCCGAGCTTGGCTC |
| | GAGCATGGTCATAGCTGTTTCCTGTGTGAAATTGTTATCCGCTCACAATTCCAC |
| | ACAACATACGAGCCGGAAGCATAAAGTGTAAAGCCTGGGGTGCCTAATGAGTGA |
| | GCTAACTCACATTAATTGCGTTGCGCTCACTGCCCGCTTTCCAGTCGGGAAACC |
| | TGTCGTGCCAGCTGCATTAATGAATCGGCCAACGCGCGGGGAGAGGCGGTTTGC |
| | GTATTGGGCACTCTTGCGCTTCCTCGCTCACTGACTCGCTGCGCTCGGTCGTTC |
| | GGCTGCGGCGAGCGGTATCAGCTCACTCAAAGGCGGTAATACGGTTATCCACAG |
| | AATCAGGGGATAACGCAGGAAAGAACATGTGAGCAAAAGGCCAGCAAAAGGCCA |
| | GGAACCGTAAAAAGGCCGCGTTGCTGGCGTTTTTCCATAGGCTCCGCCCCCCTG |
| | ACGAGCATCACAAAAATCGACGCTCAAGTCAGAGGTGGCGAAACCCGACAGGAC |
| | TATAAAGATACCAGGCGTTTCCCCCTGGAAGCTCCCTCGTGCGCTCTCCTGTTC |
| | CGACCCTGCCGCTTACCGGATACCTGTCCGCCTTTCTCCCTTCGGGAAGCGTGG |
| | CGCTTTCTCATAGCTCACGCTGTAGGTATCTCAGTTCGGTGTAGGTCGTTCGCT |
| | CCAAGCTGGGCTGTGTGCACGAACCCCCCGTTCAGCCCGACCGCTGCGCCTTAT |
| | CCGGTAACTATCGTCTTGAGTCCAACCCGGTAAGACACGACTTATCGCCACTGG |
| | CAGCAGCCACTGGTAACAGGATTAGCAGAGCGAGGTATGTAGGCGGTGCTACAG |
| | AGTTCTTGAAGTGGTGGCCTAACTACGGCTACACTAGAAGAACAGTATTTGGTA |
| | TCTGCGCTCTGCTGAAGCCAGTTACCTTCGGAAAAAGAGTTGGTAGCTCTTGAT |
| | CCGGCAAACAAACCACCGCTGGTAGCGGTGGTTTTTTTGTTTGCAAGCAGCAGA |
| | TTACGCGCAGAAAAAAAGGATCTCAAGAAGATCCTTTGATCTTTTCTACGGGGT |
| | CTGACGCTCAGTGGAACGAAAACTCACGTTAAGGGATTTTGGTCATGAGATTAT |
| | CAAAAAGGATCTTCACCTAGATCCTTTTAAATTAAAAATGAAGTTTTAAATCAA |
| | TCTAAAGTATATATGAGTAAACTTGGTCTGACAGTTAGAAAAACTCATCGAGC |
| | (SEQ ID NO: 649) |
| Amino acid | MSEVEFSHEYWMRHALTLAKRARDEREVPVGAVLVLNNRVIGEGWNRAIGLHDP |
| sequence | TAHAEIMALRQGGLVMQNYRLYDATLYSTFEPCVMCAGAMIHSRIGRVVFGVRN |
| of the | AKTGAAGSLMDVLHHPGMNHRVEITEGILADECAALLCRFFRMPRRVFNAQKKA |
| polypeptide | QSSTDSGGSSGGSSGSETPGTSESATPESSGGSSGGSDKKYSIGLAIGTNSVGW |
| encoded | AVITDEYKVPSKKFKVLGNTDRHSIKKNLIGALLFDSGETAEATRLKRTARRRY |
| by | TRRKNRICYLQEIFSNEMAKVDDSFFHRLEESFLVEEDKKHERHPIFGNIVDEV |
| mRNA2926 | AYHEKYPTIYHLRKKLVDSTDKADLRLIYLALAHMIKFRGHFLIEGDLNPDNSD |
| | VDKLFIQLVQTYNQLFEENPINASGVDAKAILSARLSKSRRLENLIAQLPGEKK |
| | NGLFGNLIALSLGLTPNFKSNFDLAEDAKLQLSKDTYDDDLDNLLAQIGDQYAD |
| | LFLAAKNLSDAILLSDILRVNTEITKAPLSASMIKRYDEHHQDLTLLKALVRQQ |
| | LPEKYKEIFFDQSKNGYAGYIDGGASQEEFYKFIKPILEKMDGTEELLVKLNRE |
| | DLLRKQRTFDNGSIPHQIHLGELHAILRRQEDFYPFLKDNREKIEKILTFRIPY |
| | YVGPLARGNSRFAWMTRKSEETITPWNFEEVVDKGASAQSFIERMTNFDKNLPN |
| | EKVLPKHSLLYEYFTVYNELTKVKYVTEGMRKPAFLSGEQKKAIVDLLFKTNRK |
| | VTVKQLKEDYFKKIECFDSVEISGVEDRFNASLGTYHDLLKIIKDKDFLDNEEN |
| | EDILEDIVLTLTLFEDREMIEERLKTYAHLFDDKVMKQLKRRRYTGWGRLSRKL |
| | INGIRDKQSGKTILDFLKSDGFANRNFMQLIHDDSLTFKEDIQKAQVSGQGDSL |
| | HEHIANLAGSPAIKKGILQTVKVVDELVKVMGRHKPENIVIEMARENQTTQKGQ |
| | KNSRERMKRIEEGIKELGSQILKEHPVENTQLQNEKLYLYYLQNGRDMYVDQEL |
| | DINRLSDYDVDHIVPQSFLKDDSIDNKVLTRSDKNRGKSDNVPSEEVVKKMKNY |
| | WRQLLNAKLITQRKFDNLTKAERGGLSELDKAGFIKRQLVETRQITKHVAQILD |
| | SRMNTKYDENDKLIREVKVITLKSKLVSDFRKDFQFYKVREINNYHHAHDAYLN |
| | AVVGTALIKKYPKLESEFVYGDYKVYDVRKMIAKSEQEIGKATAKYFFYSNIMN |
| | FFKTEITLANGEIRKRPLIETNGETGEIVWDKGRDFATVRKVLSMPQVNIVKKT |
| | EVQTGGFSKESILPKRNSDKLIARKKDWDPKKYGGFDSPTVAYSVLVVAKVEKG |
| | KSKKLKSVKELLGITIMERSSFEKNPIDFLEAKGYKEVKKDLIIKLPKYSLFEL |
| | ENGRKRMLASAGELQKGNELALPSKYVNFLYLASHYEKLKGSPEDNEQKQLFVE |
| | QHKHYLDEIIEQISEFSKRVILADANLDKVLSAYNKHRDKPIREQAENIIHLFT |
| | LTNLGAPAAFKYFDTTIDRKRYTSTKEVLDATLIHQSITGLYETRIDLSQLGGD |
| | EGADKRTADGSEFESPKKKRKV (SEQ ID NO: 650) |
| Nucleotide | CATCAAATGAAACTGCAATTTATTCATATCAGGATTATCAATACCATATTTTTG |
| sequence | AAAAAGCCGTTTCTGTAATGAAGGAGAAAACTCACCGAGGCAGTTCCATAGGAT |
| of a | GGCAAGATCCTGGTATCGGTCTGCGATTCCGACTCGTCCAACATCAATACAACC |
| plasmid | TATTAATTTCCCCTCGTCAAAAATAAGGTTATCAAGTGAGAAATCACCATGAGT |
| encoding | GACGACTGAATCCGGTGAGAATGGCAAAAGTTTATGCATTTCTTTCCAGACTTG |
| mRNA2892 | TTCAACAGGCCAGCCATTACGCTCGTCATCAAAATCACTCGCATCAACCAAACC |
| | GTTATTCATTCGTGATTGCGCCTGAGCGAGACGAAATACGCGATCGCTGTTAAA |
| | AGGACAATTACAAACAGGAATCGAATGCAACCGGCGCAGGAACACTGCCAGCGC |
| | ATCAACAATATTTTCACCTGAATCAGGATATTCTTCTAATACCTGGAATGCTGT |
| | TTTCCCAGGGATCGCAGTGGTGAGTAACCATGCATCATCAGGAGTACGGATAAA |
| | ATGCTTGATGGTCGGAAGAGGCATAAATTCCGTCAGCCAGTTTAGTCTGACCAT |
| | CTCATCTGTAACATCATTGGCAACGCTACCTTTGCCATGTTTCAGAAACAACTC |
| | TGGCGCATCGGGCTTCCCATACAATCGATAGATTGTCGCACCTGATTGCCCGAC |
| | ATTATCGCGAGCCCATTTATACCCATATAAATCAGCATCCATGTTGGAATTTAA |
| | TCGCGGCCTAGAGCAAGACGTTTCCCGTTGAATATGGCTCATACTCTTCCTTTT |
| | TCAATATTATTGAAGCATTTATCAGGGTTATTGTCTCATGAGCGGATACATATT |
| | TGAATGTATTTAGAAAAATAAACAAATAGGGGTTCCGCGCACATTTCCCCGAAA |
| | AGTGCCACCTGACGTCTAAGAAACCATTATTATCATGACATTAACCTATAAAAA |
| | TAGGCGTATCACGAGGCCCTTTCGTCTCGCGCGTTTCGGTGATGACGGTGAAAA |
| | CCTCTGACACATGCAGCTCCCGGAGACGGTCACAGCTTGTCTGTAAGCGGATGC |
| | CGGGAGCAGACAAGCCCGTCAGGGCGCGTCAGCGGGTGTTGGCGGGTGTCGGGG |
| | CTGGCTTAACTATGCGGCATCAGAGCAGATTGTACTGAGAGTGCACCATATGCG |
| | GTGTGAAATACCGCACAGATGCGTAAGGAGAAAATACCGCATCAGGCGCCATTC |
| | GCCATTCAGGCTGCGCAACTGTTGGGAAGGGCGATCGGTGCGGGCCTCTTCGCT |
| | ATTACGCCAGCTGGCGAAAGGGGGATGTGCTGCAAGGCGATTAAGTTGGGTAAC |
| | GCCAGGGTTTTCCCAGTCACGACGTTGTAAAACGACGGCCAGTGAATTGACGCG |
| | TATTGGGATCGAGCTCGGTACCTAATACGACACACTATAAGGAAATAAGAGAGA |
| | AAAGAAGAGTAAGAAGAAATATAAGAGCCACCATGAGCGAGGTCGAGTTCTCTC |
| | ACGAATATTGGATGAGACACGCTCTCACCCTGGCTAAGAGAGCCAGGGACGAAA |
| | GAGAGGTGCCAGTTGGCGCTGTCCTGGTGTTGAACAATCGCGTCATCGGAGAAG |
| | GATGGAATCGCGCCATTGGCCTGCACGATCCAACCGCACATGCCGAAATTATGG |
| | CTCTGCGGCAAGGCGGCCTCGTGATGCAAAATTACAGACTGTACGATGCTACCC |
| | TCTACTCCACCTTCGAGCCCTGTGTCATGTGTGCTGGGGCAATGATTCACTCCC |
| | GGATTGGCCGCGTGGTGTTTGGAGTGCGGAATGCCAAGACTGGCGCCGCTGGAT |
| | CTCTGATGGACGTCCTGCACCATCCTGGGATGAACCACCGGGTCGAGATCACAG |
| | AGGGAATTCTGGCTGACGAGTGCGCTGCCCTGCTGTGCAGGTTCTTTAGAATGC |
| | CTAGAAGGGTGTTCAACGCCCAGAAAAAAGCTCAGAGCAGCACCGATTCCGGCG |
| | GAAGCAGCGGAGGATCTTCTGGAAGCGAAACCCCAGGCACCAGCGAGTCTGCCA |
| | CACCAGAATCATCTGGCGGTAGCTCCGGCGGCAGCAAGAGAAATTACATCCTCG |
| | GACTGGCCATCGGCATCACCTCTGTCGGCTACGGCATCATCGACTACGAGACAC |
| | GGGACGTGATCGATGCCGGCGTGCGGCTGTTTAAAGAGGCCAACGTCGAGAACA |
| | ACGAGGGCCGCAGATCTAAGAGAGGCGCCAGACGGCTGAAGAGAAGAAGAAGGC |
| | ACCGGATCCAGAGAGTGAAGAAGCTGCTGTTCGACTACAACCTGCTGACCGACC |
| | ACAGCGAGCTGAGCGGCATCAATCCTTACGAGGCCAGAGTGAAGGGCCTGAGCC |
| | AGAAGCTGAGCGAGGAAGAGTTTAGCGCTGCCCTGCTGCACCTGGCCAAGAGAA |
| | GAGGCGTGCACAACGTGAACGAGGTGGAAGAGGACACCGGCAACGAGCTGTCCA |
| | CCAAAGAGCAGATCAGCCGGAACAGCAAGGCCCTGGAAGAGAAATACGTGGCCG |
| | AACTGCAGCTGGAACGGCTGAAAAAGGATGGCGAAGTGCGGGGCAGCATCAACC |
| | GGTTCAAGACCAGCGACTACGTGAAAGAAGCCAAACAGCTGCTGAAGGTGCAGA |
| | AGGCCTACCACCAGCTGGACCAGAGCTTCATCGACACCTACATCGACCTGCTGG |
| | AAACCCGGCGGACCTACTATGAAGGACCTGGCGAGGGAAGCCCCTTCGGCTGGA |
| | AGGACATCAAAGAATGGTACGAGATGCTGATGGGCCACTGCACCTACTTTCCCG |
| | AGGAACTGCGGAGCGTGAAGTACGCCTACAACGCCGACCTGTACAACGCCCTGA |
| | ACGACCTGAACAACCTCGTGATCACCCGGGACGAGAACGAGAAGCTGGAATATT |
| | ACGAGAAGTTCCAAATCATCGAGAACGTGTTCAAGCAGAAGAAAAAGCCCACGC |
| | TGAAGCAGATCGCCAAAGAGATCCTGGTCAACGAGGAAGATATCAAGGGCTACA |
| | GAGTGACCAGCACCGGCAAGCCCGAGTTCACCAACCTGAAGGTGTACCACGACA |
| | TCAAGGATATCACAGCCCGGAAAGAAATCATTGAGAATGCCGAGCTGCTCGACC |
| | AGATTGCCAAGATCCTGACCATCTACCAGAGCAGCGAGGACATCCAAGAGGAAC |
| | TGACCAATCTGAACTCCGAGCTGACCCAAGAAGAGATCGAACAGATCAGCAATC |
| | TGAAGGGGTACACCGGCACACACAACCTGAGCCTGAAGGCCATCAACCTGATCC |
| | TGGACGAGCTGTGGCACACCAACGACAACCAGATCGCTATCTTCAACCGGCTGA |
| | AGCTGGTGCCCAAGAAGGTGGACCTGTCTCAGCAGAAAGAGATTCCCACCACAC |
| | TGGTGGACGACTTCATTCTGAGCCCCGTGGTCAAGAGAAGCTTCATCCAGAGCA |
| | TCAAAGTGATCAACGCCATCATCAAGAAGTACGGGCTGCCCAACGATATCATCA |
| | TCGAGCTGGCCCGCGAGAAGAACTCCAAGGACGCCCAGAAAATGATCAACGAGA |
| | TGCAGAAGCGGAACCGGCAGACCAACGAGCGGATCGAGGAAATCATCCGGACCA |
| | CCGGCAAAGAGAACGCCAAGTACCTGATCGAGAAGATCAAGCTGCACGACATGC |
| | AAGAGGGCAAGTGCCTGTACAGCCTGGAAGCCATTCCTCTGGAAGATCTGCTGA |
| | ACAATCCCTTCAACTATGAGGTGGACCACATCATCCCCAGAAGCGTGTCCTTCG |
| | ACAACAGCTTCAACAACAAGGTGCTCGTGAAGCAAGAGGAAAACAGCAAGAAGG |
| | GCAACAGAACCCCATTCCAGTACCTGAGCAGCTCCGACAGCAAGATCAGCTACG |
| | AAACCTTCAAGAAGCACATCCTGAATCTGGCCAAAGGCAAGGGCAGAATCAGCA |
| | AGACCAAGAAAGAGTATCTGCTCGAGGAACGGGACATCAACAGATTCAGCGTGC |
| | AGAAAGACTTCATCAATCGGAACCTGGTGGACACCAGATACGCCACCAGAGGCC |
| | TGATGAATCTGCTGCGGAGCTACTTCAGAGTGAACAATCTGGACGTGAAAGTCA |
| | AGTCCATCAACGGCGGCTTCACCAGCTTTCTGCGGCGGAAGTGGAAGTTTAAGA |
| | AAGAGCGGAACAAGGGCTATAAGCACCATGCCGAGGACGCCCTGATCATTGCCA |
| | ACGCCGATTTCATCTTCAAAGAGTGGAAGAAACTGGACAAGGCCAAAAAAGTGA |
| | TGGAAAACCAGATGTTCGAGGAAAAGCAGGCCGAGAGCATGCCCGAGATCGAGA |
| | CTGAGCAAGAGTACAAAGAGATTTTCATCACGCCCCACCAGATCAAGCACATTA |
| | AGGACTTCAAGGACTACAAGTACAGCCACCGCGTGGACAAGAAGCCCAACCGGA |
| | AGCTGATCAATGACACACTGTACAGCACCCGGAAGGACGACAAGGGCAATACCC |
| | TGATCGTCAACAACCTGAACGGCCTGTACGACAAGGACAACGACAAGCTCAAGA |
| | AGCTGATTAACAAGAGCCCCGAGAAGCTCCTGATGTACCATCACGACCCTCAGA |
| | CCTACCAGAAACTGAAGCTCATCATGGAACAGTACGGCGACGAGAAAAACCCGC |
| | TGTACAAGTACTACGAGGAAACCGGAAACTACCTGACCAAGTACTCCAAAAAGG |
| | ACAATGGGCCCGTGATCAAGAAGATTAAGTATTACGGCAACAAGCTGAATGCCC |
| | ACCTGGACATCACCGACGACTACCCCAACAGCAGAAACAAGGTGGTCAAGCTGT |
| | CCCTGAAGCCTTACAGATTCGACGTGTACCTGGACAACGGCGTGTACAAGTTCG |
| | TGACCGTGAAGAACCTGGACGTCATCAAAAAAGAAAACTACTACGAAGTCAACA |
| | GCAAGTGCTATGAGGAAGCCAAGAAACTCAAGAAAATCAGCAACCAGGCCGAGT |
| | TTATCGCCAGCTTCTACAAGAACGACCTCATCAAGATCAACGGGGAGCTGTATA |
| | GAGTGATCGGGGTCAACAATGACCTGCTGAACCGGATCGAAGTGAACATGATCG |
| | ACATCACCTACCGCGAGTACCTCGAGAACATGAACGATAAGCGGCCACCGCACA |
| | TCATTAAGACAATCGCCAGCAAGACGCAGAGCATTAAGAAGTACAGCACAGACA |
| | TCCTGGGGAACCTGTACGAAGTGAAGTCCAAAAAGCACCCGCAGATTATCAAGA |
| | AAGGCGGCAGCCCCAAGAAAAAAAGAAAGGTTTCCTCCGACTACAAGGACCACG |
| | ATGGCGATTATAAGGATCACGACATCGATTACAAGGACGATGACGACAAGGAAG |
| | GCGCCGATAAGAGAACCGCCGATGGCTCTGAGTTCGAGAGCCCCAAGAAAAAGC |
| | GCAAAGTGTAATAGTGAGCGGCCGCTTAATTAAGCTGCCTTCTGCGGGGCTTGC |
| | CTTCTGGCCAAGCCCTTCTTCTCTCCCTTGCACCTGTACCTCTTGGTCTTTGAA |
| | TAAAGCCTGAGTAGGAAGTCTAGAGTTTAAACATTTAAATCTGCAGATCCCAAT |
| | GGCGCGCCGAGCTTGGCTCGAGCATGGTCATAGCTGTTTCCTGTGTGAAATTGT |
| | TATCCGCTCACAATTCCACACAACATACGAGCCGGAAGCATAAAGTGTAAAGCC |
| | TGGGGTGCCTAATGAGTGAGCTAACTCACATTAATTGCGTTGCGCTCACTGCCC |
| | GCTTTCCAGTCGGGAAACCTGTCGTGCCAGCTGCATTAATGAATCGGCCAACGC |
| | GCGGGGAGAGGCGGTTTGCGTATTGGGCACTCTTGCGCTTCCTCGCTCACTGAC |
| | TCGCTGCGCTCGGTCGTTCGGCTGCGGCGAGCGGTATCAGCTCACTCAAAGGCG |
| | GTAATACGGTTATCCACAGAATCAGGGGATAACGCAGGAAAGAACATGTGAGCA |
| | AAAGGCCAGCAAAAGGCCAGGAACCGTAAAAAGGCCGCGTTGCTGGCGTTTTTC |
| | CATAGGCTCCGCCCCCCTGACGAGCATCACAAAAATCGACGCTCAAGTCAGAGG |
| | TGGCGAAACCCGACAGGACTATAAAGATACCAGGCGTTTCCCCCTGGAAGCTCC |
| | CTCGTGCGCTCTCCTGTTCCGACCCTGCCGCTTACCGGATACCTGTCCGCCTTT |
| | CTCCCTTCGGGAAGCGTGGCGCTTTCTCATAGCTCACGCTGTAGGTATCTCAGT |
| | TCGGTGTAGGTCGTTCGCTCCAAGCTGGGCTGTGTGCACGAACCCCCCGTTCAG |
| | CCCGACCGCTGCGCCTTATCCGGTAACTATCGTCTTGAGTCCAACCCGGTAAGA |
| | CACGACTTATCGCCACTGGCAGCAGCCACTGGTAACAGGATTAGCAGAGCGAGG |
| | TATGTAGGCGGTGCTACAGAGTTCTTGAAGTGGTGGCCTAACTACGGCTACACT |
| | AGAAGAACAGTATTTGGTATCTGCGCTCTGCTGAAGCCAGTTACCTTCGGAAAA |
| | AGAGTTGGTAGCTCTTGATCCGGCAAACAAACCACCGCTGGTAGCGGTGGTTTT |
| | TTTGTTTGCAAGCAGCAGATTACGCGCAGAAAAAAAGGATCTCAAGAAGATCCT |
| | TTGATCTTTTCTACGGGGTCTGACGCTCAGTGGAACGAAAACTCACGTTAAGGG |
| | ATTTTGGTCATGAGATTATCAAAAAGGATCTTCACCTAGATCCTTTTAAATTAA |
| | AAATGAAGTTTTAAATCAATCTAAAGTATATATGAGTAAACTTGGTCTGACAGT |
| | TAGAAAAACTCATCGAG (SEQ ID NO: 651) |
| Amino acid | MSEVEFSHEYWMRHALTLAKRARDEREVPVGAVLVLNNRVIGEGWNRAIGLHDP |
| sequence | TAHAEIMALRQGGLVMQNYRLYDATLYSTFEPCVMCAGAMIHSRIGRVVFGVRN |
| of the | AKTGAAGSLMDVLHHPGMNHRVEITEGILADECAALLCRFFRMPRRVFNAQKKA |
| polypeptide | QSSTDSGGSSGGSSGSETPGTSESATPESSGGSSGGSKRNYILGLAIGITSVGY |
| encoded | GIIDYETRDVIDAGVRLFKEANVENNEGRRSKRGARRLKRRRRHRIQRVKKLLF |
| by | DYNLLTDHSELSGINPYEARVKGLSQKLSEEEFSAALLHLAKRRGVHNVNEVEE |
| mRNA2892 | DTGNELSTKEQISRNSKALEEKYVAELQLERLKKDGEVRGSINRFKTSDYVKEA |
| | KQLLKVQKAYHQLDQSFIDTYIDLLETRRTYYEGPGEGSPFGWKDIKEWYEMLM |
| | GHCTYFPEELRSVKYAYNADLYNALNDLNNLVITRDENEKLEYYEKFQIIENVF |
| | KQKKKPTLKQIAKEILVNEEDIKGYRVTSTGKPEFTNLKVYHDIKDITARKEII |
| | ENAELLDQIAKILTIYQSSEDIQEELTNLNSELTQEEIEQISNLKGYTGTHNLS |
| | LKAINLILDELWHTNDNQIAIFNRLKLVPKKVDLSQQKEIPTTLVDDFILSPVV |
| | KRSFIQSIKVINAIIKKYGLPNDIIIELAREKNSKDAQKMINEMQKRNRQTNER |
| | IEEIIRTTGKENAKYLIEKIKLHDMQEGKCLYSLEAIPLEDLLNNPFNYEVDHI |
| | IPRSVSFDNSFNNKVLVKQEENSKKGNRTPFQYLSSSDSKISYETFKKHILNLA |
| | KGKGRISKTKKEYLLEERDINRFSVQKDFINRNLVDTRYATRGLMNLLRSYFRV |
| | NNLDVKVKSINGGFTSFLRRKWKFKKERNKGYKHHAEDALIIANADFIFKEWKK |
| | LDKAKKVMENQMFEEKQAESMPEIETEQEYKEIFITPHQIKHIKDFKDYKYSHR |
| | VDKKPNRKLINDTLYSTRKDDKGNTLIVNNLNGLYDKDNDKLKKLINKSPEKLL |
| | MYHHDPQTYQKLKLIMEQYGDEKNPLYKYYEETGNYLTKYSKKDNGPVIKKIKY |
| | YGNKLNAHLDITDDYPNSRNKVVKLSLKPYRFDVYLDNGVYKFVTVKNLDVIKK |
| | ENYYEVNSKCYEEAKKLKKISNQAEFIASFYKNDLIKINGELYRVIGVNNDLLN |
| | RIEVNMIDITYREYLENMNDKRPPHIIKTIASKTQSIKKYSTDILGNLYEVKSK |
| | KHPQIIKKGGSPKKKRKVSSDYKDHDGDYKDHDIDYKDDDDKEGADKRTADGSE |
| | FESPKKKRKV (SEQ ID NO: 652) |
| Nucleotide | TCTAGAGTTTAAACATTTAAATCTGCAGATCCCAATGGCGCGCCGAGCTTGGCT |
| sequence | CGAGCATGGTCATAGCTGTTTCCTGTGTGAAATTGTTATCCGCTCACAATTCCA |
| of a | CACAACATACGAGCCGGAAGCATAAAGTGTAAAGCCTGGGGTGCCTAATGAGTG |
| plasmid | AGCTAACTCACATTAATTGCGTTGCGCTCACTGCCCGCTTTCCAGTCGGGAAAC |
| encoding | CTGTCGTGCCAGCTGCATTAATGAATCGGCCAACGCGCGGGGAGAGGCGGTTTG |
| mRNA2970 | CGTATTGGGCACTCTTGCGCTTCCTCGCTCACTGACTCGCTGCGCTCGGTCGTT |
| | CGGCTGCGGCGAGCGGTATCAGCTCACTCAAAGGCGGTAATACGGTTATCCACA |
| | GAATCAGGGGATAACGCAGGAAAGAACATGTGAGCAAAAGGCCAGCAAAAGGCC |
| | AGGAACCGTAAAAAGGCCGCGTTGCTGGCGTTTTTCCATAGGCTCCGCCCCCCT |
| | GACGAGCATCACAAAAATCGACGCTCAAGTCAGAGGTGGCGAAACCCGACAGGA |
| | CTATAAAGATACCAGGCGTTTCCCCCTGGAAGCTCCCTCGTGCGCTCTCCTGTT |
| | CCGACCCTGCCGCTTACCGGATACCTGTCCGCCTTTCTCCCTTCGGGAAGCGTG |
| | GCGCTTTCTCATAGCTCACGCTGTAGGTATCTCAGTTCGGTGTAGGTCGTTCGC |
| | TCCAAGCTGGGCTGTGTGCACGAACCCCCCGTTCAGCCCGACCGCTGCGCCTTA |
| | TCCGGTAACTATCGTCTTGAGTCCAACCCGGTAAGACACGACTTATCGCCACTG |
| | GCAGCAGCCACTGGTAACAGGATTAGCAGAGCGAGGTATGTAGGCGGTGCTACA |
| | GAGTTCTTGAAGTGGTGGCCTAACTACGGCTACACTAGAAGAACAGTATTTGGT |
| | ATCTGCGCTCTGCTGAAGCCAGTTACCTTCGGAAAAAGAGTTGGTAGCTCTTGA |
| | TCCGGCAAACAAACCACCGCTGGTAGCGGTGGTTTTTTTGTTTGCAAGCAGCAG |
| | ATTACGCGCAGAAAAAAAGGATCTCAAGAAGATCCTTTGATCTTTTCTACGGGG |
| | TCTGACGCTCAGTGGAACGAAAACTCACGTTAAGGGATTTTGGTCATGAGATTA |
| | TCAAAAAGGATCTTCACCTAGATCCTTTTAAATTAAAAATGAAGTTTTAAATCA |
| | ATCTAAAGTATATATGAGTAAACTTGGTCTGACAGTTAGAAAAACTCATCGAGC |
| | ATCAAATGAAACTGCAATTTATTCATATCAGGATTATCAATACCATATTTTTGA |
| | AAAAGCCGTTTCTGTAATGAAGGAGAAAACTCACCGAGGCAGTTCCATAGGATG |
| | GCAAGATCCTGGTATCGGTCTGCGATTCCGACTCGTCCAACATCAATACAACCT |
| | ATTAATTTCCCCTCGTCAAAAATAAGGTTATCAAGTGAGAAATCACCATGAGTG |
| | ACGACTGAATCCGGTGAGAATGGCAAAAGTTTATGCATTTCTTTCCAGACTTGT |
| | TCAACAGGCCAGCCATTACGCTCGTCATCAAAATCACTCGCATCAACCAAACCG |
| | TTATTCATTCGTGATTGCGCCTGAGCGAGACGAAATACGCGATCGCTGTTAAAA |
| | GGACAATTACAAACAGGAATCGAATGCAACCGGCGCAGGAACACTGCCAGCGCA |
| | TCAACAATATTTTCACCTGAATCAGGATATTCTTCTAATACCTGGAATGCTGTT |
| | TTCCCAGGGATCGCAGTGGTGAGTAACCATGCATCATCAGGAGTACGGATAAAA |
| | TGCTTGATGGTCGGAAGAGGCATAAATTCCGTCAGCCAGTTTAGTCTGACCATC |
| | TCATCTGTAACATCATTGGCAACGCTACCTTTGCCATGTTTCAGAAACAACTCT |
| | GGCGCATCGGGCTTCCCATACAATCGATAGATTGTCGCACCTGATTGCCCGACA |
| | TTATCGCGAGCCCATTTATACCCATATAAATCAGCATCCATGTTGGAATTTAAT |
| | CGCGGCCTAGAGCAAGACGTTTCCCGTTGAATATGGCTCATACTCTTCCTTTTT |
| | CAATATTATTGAAGCATTTATCAGGGTTATTGTCTCATGAGCGGATACATATTT |
| | GAATGTATTTAGAAAAATAAACAAATAGGGGTTCCGCGCACATTTCCCCGAAAA |
| | GTGCCACCTGACGTCTAAGAAACCATTATTATCATGACATTAACCTATAAAAAT |
| | AGGCGTATCACGAGGCCCTTTCGTCTCGCGCGTTTCGGTGATGACGGTGAAAAC |
| | CTCTGACACATGCAGCTCCCGGAGACGGTCACAGCTTGTCTGTAAGCGGATGCC |
| | GGGAGCAGACAAGCCCGTCAGGGCGCGTCAGCGGGTGTTGGCGGGTGTCGGGGC |
| | TGGCTTAACTATGCGGCATCAGAGCAGATTGTACTGAGAGTGCACCATATGCGG |
| | TGTGAAATACCGCACAGATGCGTAAGGAGAAAATACCGCATCAGGCGCCATTCG |
| | CCATTCAGGCTGCGCAACTGTTGGGAAGGGCGATCGGTGCGGGCCTCTTCGCTA |
| | TTACGCCAGCTGGCGAAAGGGGGATGTGCTGCAAGGCGATTAAGTTGGGTAACG |
| | CCAGGGTTTTCCCAGTCACGACGTTGTAAAACGACGGCCAGTGAATTGACGCGT |
| | ATTGGGATCGAGCTCGGTACCTAATACGACACACTATAAGGAAATAAGAGAGAA |
| | AAGAAGAGTAAGAAGAAATATAAGAGCCACCATGAGCGAGGTCGAGTTCTCTCA |
| | CGAATATTGGATGAGACACGCTCTCACCCTGGCTAAGAGAGCCAGGGACGAAAG |
| | AGAGGTGCCAGTTGGCGCTGTCCTGGTGTTGAACAATCGCGTCATCGGAGAAGG |
| | ATGGAATCGCGCCATTGGCCTGCACGATCCAACCGCACATGCCCAGATTATGGC |
| | TCTGCGGCAAGGCGGCCTCGTGATGCAAAATTACAGACTGTACGATGCTACCCT |
| | CTACTCCACCTTCGAGCCCTGTGTCATGTGTGCTGGGGCAATGATTCACTCCCG |
| | GATTGGCCGCGTGGTGTTTGGAGTGCGGAATGCCAAGACTGGCGCCGCTGGATC |
| | TCTGATGGACGTCCTGCACCATCCTGGGATGAACCACCGGGTCGAGATCACAGA |
| | GGGAATTCTGGCTGACGAGTGCGCTGCCCTGCTGTGCAGGTTCTTTAGAATGCC |
| | TAGAAGGGTGTTCAACGCCCAGAAAAAAGCTCAGAGCAGCACCGATTCCGGCGG |
| | AAGCAGCGGAGGATCTTCTGGAAGCGAAACCCCAGGCACCAGCGAGTCTGCCAC |
| | ACCAGAATCATCTGGCGGTAGCTCCGGCGGCAGCGACAAGAAGTATTCTATCGG |
| | ACTGGCCATCGGCACCAACTCTGTTGGATGGGCCGTGATCACCGACGAGTACAA |
| | GGTGCCCAGCAAGAAATTCAAGGTGCTGGGCAACACCGACAGGCACAGCATCAA |
| | GAAGAACCTGATCGGCGCACTGCTGTTCGACTCTGGCGAAACAGCCGAGGCCAC |
| | CAGACTGAAGAGAACAGCCCGCAGACGGTACACCAGAAGAAAGAACCGGATCTG |
| | CTACCTCCAAGAGATCTTCAGCAACGAGATGGCCAAGGTGGACGACAGCTTCTT |
| | CCACAGACTGGAAGAGTCCTTCCTGGTGGAAGAGGACAAGAAGCACGAGAGACA |
| | CCCCATCTTCGGCAACATCGTGGACGAGGTGGCCTACCACGAGAAGTACCCCAC |
| | CATCTACCACCTGAGAAAGAAACTGGTGGACAGCACCGACAAGGCCGACCTGAG |
| | ACTGATCTATCTGGCCCTGGCTCACATGATCAAGTTCCGGGGCCACTTCCTGAT |
| | CGAGGGCGACCTGAATCCTGACAACAGCGACGTGGACAAGCTGTTCATCCAGCT |
| | GGTGCAGACCTACAACCAGCTGTTCGAGGAAAACCCCATCAACGCCAGCGGAGT |
| | GGATGCCAAGGCCATCCTGTCTGCCAGACTGAGCAAGAGCAGACGGCTGGAAAA |
| | TCTGATCGCCCAGCTGCCTGGCGAGAAGAAGAATGGCCTGTTCGGCAACCTGAT |
| | TGCCCTGAGCCTGGGCCTGACACCTAACTTCAAGAGCAACTTCGACCTGGCCGA |
| | GGACGCCAAACTGCAGCTGAGCAAGGACACCTACGACGACGACCTGGACAATCT |
| | GCTGGCCCAGATCGGCGATCAGTACGCCGACTTGTTTCTGGCCGCCAAGAATCT |
| | GAGCGACGCCATCCTGCTGTCCGACATCCTGAGAGTGAACACCGAGATCACCAA |
| | GGCACCTCTGAGCGCCTCTATGATCAAGAGATACGACGAGCACCACCAGGATCT |
| | GACCCTGCTGAAGGCCCTCGTTAGACAGCAGCTGCCAGAGAAGTACAAAGAGAT |
| | TTTCTTCGACCAGAGCAAGAACGGCTACGCCGGCTACATTGATGGCGGAGCCAG |
| | CCAAGAGGAATTCTACAAGTTCATCAAGCCCATCCTCGAGAAGATGGACGGCAC |
| | CGAGGAACTGCTGGTCAAGCTGAACAGAGAGGACCTGCTGAGAAAGCAGAGAAC |
| | CTTCGACAACGGCAGCATCCCTCACCAGATCCACCTGGGAGAACTGCACGCCAT |
| | TCTGCGGAGACAAGAGGACTTTTACCCATTCCTGAAGGACAACCGGGAAAAGAT |
| | CGAGAAAATCCTGACCTTCAGGATCCCCTACTACGTGGGACCACTGGCCAGAGG |
| | CAATAGCAGATTCGCCTGGATGACCAGAAAGAGCGAGGAAACCATCACTCCCTG |
| | GAACTTCGAGGAAGTGGTGGACAAGGGCGCCAGCGCTCAGTCCTTCATCGAGCG |
| | GATGACCAACTTCGATAAGAACCTGCCTAACGAGAAGGTGCTGCCCAAGCACAG |
| | CCTGCTGTACGAGTACTTCACCGTGTACAACGAGCTGACCAAAGTGAAATACGT |
| | GACCGAGGGAATGAGAAAGCCCGCCTTTCTGAGCGGCGAGCAGAAAAAGGCCAT |
| | CGTGGATCTGCTGTTCAAGACCAACCGGAAAGTGACCGTGAAGCAGCTGAAAGA |
| | GGACTACTTCAAGAAAATCGAGTGCTTCGACAGCGTCGAGATCTCCGGCGTGGA |
| | AGATCGGTTCAATGCCAGCCTGGGCACATACCACGATCTGCTGAAAATTATCAA |
| | GGACAAGGACTTCCTGGACAACGAAGAGAACGAGGACATCCTTGAGGACATCGT |
| | GCTGACACTGACCCTGTTTGAGGACAGAGAGATGATCGAGGAACGGCTGAAAAC |
| | ATACGCCCACCTGTTCGACGACAAAGTGATGAAGCAACTGAAGCGGCGGAGATA |
| | CACCGGCTGGGGCAGACTGTCTCGGAAGCTGATCAACGGCATCCGGGATAAGCA |
| | GTCCGGCAAGACCATCCTGGACTTTCTGAAGTCCGACGGCTTCGCCAACAGAAA |
| | CTTCATGCAGCTGATTCACGACGACAGCCTCACCTTCAAAGAGGATATCCAGAA |
| | AGCCCAGGTGTCCGGCCAGGGCGATTCTCTGCATGAGCACATTGCCAACCTGGC |
| | CGGCTCTCCCGCCATTAAGAAAGGCATCCTGCAGACAGTGAAGGTGGTGGACGA |
| | GCTTGTGAAAGTGATGGGCAGACACAAGCCCGAGAACATCGTGATCGAAATGGC |
| | CAGAGAGAACCAGACCACACAGAAGGGACAGAAGAACAGCCGCGAGAGAATGAA |
| | GCGGATCGAAGAGGGCATCAAAGAGCTGGGCAGCCAGATCCTGAAAGAACACCC |
| | CGTGGAAAACACCCAGCTGCAGAACGAGAAGCTGTACCTGTACTACCTGCAGAA |
| | TGGACGGGATATGTACGTGGACCAAGAGCTGGACATCAACAGACTGTCCGACTA |
| | CGATGTGGACCATATCGTGCCCCAGTCTTTTCTGAAGGACGACTCCATCGACAA |
| | CAAGGTCCTGACCAGATCCGACAAGAATCGGGGCAAGAGCGACAACGTGCCCTC |
| | CGAAGAGGTGGTCAAGAAGATGAAGAACTACTGGCGACAGCTGCTGAACGCCAA |
| | GCTGATTACCCAGCGGAAGTTCGACAATCTGACCAAGGCCGAAAGAGGCGGCCT |
| | GAGCGAACTGGATAAGGCCGGCTTCATCAAGAGACAGCTGGTGGAAACCCGGCA |
| | GATCACAAAGCACGTGGCACAGATTCTGGACTCTCGGATGAACACTAAGTACGA |
| | CGAGAACGACAAACTGATCCGCGAAGTGAAAGTCATCACCCTGAAGTCCAAGCT |
| | GGTGTCCGATTTCCGGAAGGATTTCCAGTTCTACAAAGTGCGCGAGATCAACAA |
| | CTACCATCACGCCCACGACGCCTACCTGAATGCCGTTGTTGGAACAGCCCTGAT |
| | CAAAAAGTACCCTAAGCTGGAAAGCGAGTTCGTGTACGGCGACTACAAGGTGTA |
| | CGACGTGCGGAAGATGATCGCCAAGAGCGAGCAAGAGATTGGCAAGGCAACCGC |
| | CAAGTACTTCTTCTACAGCAACATCATGAACTTTTTCAAGACAGAGATCACCCT |
| | CGCCAACGGCGAGATCAGAAAGCGGCCTCTGATCGAGACAAACGGCGAAACCGG |
| | CGAGATTGTGTGGGATAAGGGCAGAGACTTTGCCACAGTGCGGAAAGTGCTGAG |
| | CATGCCCCAAGTGAATATCGTGAAGAAAACCGAGGTGCAGACAGGCGGCTTCAG |
| | CAAAGAGTCTATCCTGCCTAAGCGGAACTCCGACAAGCTGATCGCCAGAAAGAA |
| | GGACTGGGACCCCAAGAAGTACGGCGGCTTCGATTCTCCTACCGTGGCCTATAG |
| | CGTGCTGGTGGTGGCCAAAGTGGAAAAGGGCAAGTCCAAGAAACTCAAGAGCGT |
| | GAAAGAGCTGCTGGGGATCACCATCATGGAAAGAAGCAGCTTCGAGAAGAATCC |
| | GATCGATTTCCTCGAGGCCAAGGGCTACAAAGAAGTGAAAAAGGACCTGATCAT |
| | CAAGCTCCCCAAGTACTCCCTGTTCGAGCTGGAAAACGGCCGGAAGAGAATGCT |
| | GGCCTCTGCTGGCGAACTGCAGAAGGGAAACGAACTGGCCCTGCCTAGCAAATA |
| | TGTGAACTTCCTGTACCTGGCCAGCCACTATGAGAAGCTGAAGGGCAGCCCCGA |
| | GGACAATGAGCAAAAGCAGCTGTTTGTGGAACAGCACAAGCACTACCTGGACGA |
| | GATCATCGAGCAGATCAGCGAGTTTAGCAAGAGAGTGATTCTGGCCGACGCCAA |
| | TCTGGACAAAGTGCTGTCCGCCTACAACAAGCACCGGGACAAGCCTATCAGAGA |
| | GCAGGCCGAGAATATCATCCACCTGTTTACCCTGACCAACCTGGGAGCCCCTGC |
| | CGCCTTCAAGTACTTTGACACCACCATCGACCGGAAGCGGTACACCTCCACCAA |
| | AGAGGTGCTGGACGCCACTCTGATCCACCAGTCTATCACCGGCCTGTACGAGAC |
| | ACGGATCGACCTGTCTCAACTCGGAGGCGACGAAGGCGCCGATAAGAGAACCGC |
| | CGATGGCTCTGAGTTCGAGAGCCCCAAGAAAAAGCGCAAAGTGTAATAGTGAGC |
| | GGCCGCTTAATTAAGCTGCCTTCTGCGGGGCTTGCCTTCTGGCCAAGCCCTTCT |
| | TCTCTCCCTTGCACCTGTACCTCTTGGTCTTTGAATAAAGCCTGAGTAGGAAG |
| | (SEQ ID NO: 653) |
| Amino acid | MSEVEFSHEYWMRHALTLAKRARDEREVPVGAVLVLNNRVIGEGWNRAIGLHDP |
| sequence | TAHAQIMALRQGGLVMQNYRLYDATLYSTFEPCVMCAGAMIHSRIGRVVFGVRN |
| of the | AKTGAAGSLMDVLHHPGMNHRVEITEGILADECAALLCRFFRMPRRVFNAQKKA |
| polypeptide | QSSTDSGGSSGGSSGSETPGTSESATPESSGGSSGGSDKKYSIGLAIGTNSVGW |
| encoded | AVITDEYKVPSKKFKVLGNTDRHSIKKNLIGALLFDSGETAEATRLKRTARRRY |
| by | TRRKNRICYLQEIFSNEMAKVDDSFFHRLEESFLVEEDKKHERHPIFGNIVDEV |
| mRNA2970 | AYHEKYPTIYHLRKKLVDSTDKADLRLIYLALAHMIKFRGHFLIEGDLNPDNSD |
| | VDKLFIQLVQTYNQLFEENPINASGVDAKAILSARLSKSRRLENLIAQLPGEKK |
| | NGLFGNLIALSLGLTPNFKSNFDLAEDAKLQLSKDTYDDDLDNLLAQIGDQYAD |
| | LFLAAKNLSDAILLSDILRVNTEITKAPLSASMIKRYDEHHQDLTLLKALVRQQ |
| | LPEKYKEIFFDQSKNGYAGYIDGGASQEEFYKFIKPILEKMDGTEELLVKLNRE |
| | DLLRKQRTFDNGSIPHQIHLGELHAILRRQEDFYPFLKDNREKIEKILTFRIPY |
| | YVGPLARGNSRFAWMTRKSEETITPWNFEEVVDKGASAQSFIERMTNFDKNLPN |
| | EKVLPKHSLLYEYFTVYNELTKVKYVTEGMRKPAFLSGEQKKAIVDLLFKTNRK |
| | VTVKQLKEDYFKKIECFDSVEISGVEDRFNASLGTYHDLLKIIKDKDFLDNEEN |
| | EDILEDIVLTLTLFEDREMIEERLKTYAHLFDDKVMKQLKRRRYTGWGRLSRKL |
| | INGIRDKQSGKTILDFLKSDGFANRNFMQLIHDDSLTFKEDIQKAQVSGQGDSL |
| | HEHIANLAGSPAIKKGILQTVKVVDELVKVMGRHKPENIVIEMARENQTTQKGQ |
| | KNSRERMKRIEEGIKELGSQILKEHPVENTQLQNEKLYLYYLQNGRDMYVDQEL |
| | DINRLSDYDVDHIVPQSFLKDDSIDNKVLTRSDKNRGKSDNVPSEEVVKKMKNY |
| | WRQLLNAKLITQRKFDNLTKAERGGLSELDKAGFIKRQLVETRQITKHVAQILD |
| | SRMNTKYDENDKLIREVKVITLKSKLVSDFRKDFQFYKVREINNYHHAHDAYLN |
| | AVVGTALIKKYPKLESEFVYGDYKVYDVRKMIAKSEQEIGKATAKYFFYSNIMN |
| | FFKTEITLANGEIRKRPLIETNGETGEIVWDKGRDFATVRKVLSMPQVNIVKKT |
| | EVQTGGFSKESILPKRNSDKLIARKKDWDPKKYGGFDSPTVAYSVLVVAKVEKG |
| | KSKKLKSVKELLGITIMERSSFEKNPIDFLEAKGYKEVKKDLIIKLPKYSLFEL |
| | ENGRKRMLASAGELQKGNELALPSKYVNFLYLASHYEKLKGSPEDNEQKQLFVE |
| | QHKHYLDEIIEQISEFSKRVILADANLDKVLSAYNKHRDKPIREQAENIIHLFT |
| | LTNLGAPAAFKYFDTTIDRKRYTSTKEVLDATLIHQSITGLYETRIDLSQLGGD |
| | EGADKRTADGSEFESPKKKRKV (SEQ ID NO: 654) |
| Nucleotide | TCTAGAGTTTAAACATTTAAATCTGCAGATCCCAATGGCGCGCCGAGCTTGGCT |
| sequence | CGAGCATGGTCATAGCTGTTTCCTGTGTGAAATTGTTATCCGCTCACAATTCCA |
| of a | CACAACATACGAGCCGGAAGCATAAAGTGTAAAGCCTGGGGTGCCTAATGAGTG |
| plasmid | AGCTAACTCACATTAATTGCGTTGCGCTCACTGCCCGCTTTCCAGTCGGGAAAC |
| encoding | CTGTCGTGCCAGCTGCATTAATGAATCGGCCAACGCGCGGGGAGAGGCGGTTTG |
| mRNA2971 | CGTATTGGGCACTCTTGCGCTTCCTCGCTCACTGACTCGCTGCGCTCGGTCGTT |
| | CGGCTGCGGCGAGCGGTATCAGCTCACTCAAAGGCGGTAATACGGTTATCCACA |
| | GAATCAGGGGATAACGCAGGAAAGAACATGTGAGCAAAAGGCCAGCAAAAGGCC |
| | AGGAACCGTAAAAAGGCCGCGTTGCTGGCGTTTTTCCATAGGCTCCGCCCCCCT |
| | GACGAGCATCACAAAAATCGACGCTCAAGTCAGAGGTGGCGAAACCCGACAGGA |
| | CTATAAAGATACCAGGCGTTTCCCCCTGGAAGCTCCCTCGTGCGCTCTCCTGTT |
| | CCGACCCTGCCGCTTACCGGATACCTGTCCGCCTTTCTCCCTTCGGGAAGCGTG |
| | GCGCTTTCTCATAGCTCACGCTGTAGGTATCTCAGTTCGGTGTAGGTCGTTCGC |
| | TCCAAGCTGGGCTGTGTGCACGAACCCCCCGTTCAGCCCGACCGCTGCGCCTTA |
| | TCCGGTAACTATCGTCTTGAGTCCAACCCGGTAAGACACGACTTATCGCCACTG |
| | GCAGCAGCCACTGGTAACAGGATTAGCAGAGCGAGGTATGTAGGCGGTGCTACA |
| | GAGTTCTTGAAGTGGTGGCCTAACTACGGCTACACTAGAAGAACAGTATTTGGT |
| | ATCTGCGCTCTGCTGAAGCCAGTTACCTTCGGAAAAAGAGTTGGTAGCTCTTGA |
| | TCCGGCAAACAAACCACCGCTGGTAGCGGTGGTTTTTTTGTTTGCAAGCAGCAG |
| | ATTACGCGCAGAAAAAAAGGATCTCAAGAAGATCCTTTGATCTTTTCTACGGGG |
| | TCTGACGCTCAGTGGAACGAAAACTCACGTTAAGGGATTTTGGTCATGAGATTA |
| | TCAAAAAGGATCTTCACCTAGATCCTTTTAAATTAAAAATGAAGTTTTAAATCA |
| | ATCTAAAGTATATATGAGTAAACTTGGTCTGACAGTTAGAAAAACTCATCGAGC |
| | ATCAAATGAAACTGCAATTTATTCATATCAGGATTATCAATACCATATTTTTGA |
| | AAAAGCCGTTTCTGTAATGAAGGAGAAAACTCACCGAGGCAGTTCCATAGGATG |
| | GCAAGATCCTGGTATCGGTCTGCGATTCCGACTCGTCCAACATCAATACAACCT |
| | ATTAATTTCCCCTCGTCAAAAATAAGGTTATCAAGTGAGAAATCACCATGAGTG |
| | ACGACTGAATCCGGTGAGAATGGCAAAAGTTTATGCATTTCTTTCCAGACTTGT |
| | TCAACAGGCCAGCCATTACGCTCGTCATCAAAATCACTCGCATCAACCAAACCG |
| | TTATTCATTCGTGATTGCGCCTGAGCGAGACGAAATACGCGATCGCTGTTAAAA |
| | GGACAATTACAAACAGGAATCGAATGCAACCGGCGCAGGAACACTGCCAGCGCA |
| | TCAACAATATTTTCACCTGAATCAGGATATTCTTCTAATACCTGGAATGCTGTT |
| | TTCCCAGGGATCGCAGTGGTGAGTAACCATGCATCATCAGGAGTACGGATAAAA |
| | TGCTTGATGGTCGGAAGAGGCATAAATTCCGTCAGCCAGTTTAGTCTGACCATC |
| | TCATCTGTAACATCATTGGCAACGCTACCTTTGCCATGTTTCAGAAACAACTCT |
| | GGCGCATCGGGCTTCCCATACAATCGATAGATTGTCGCACCTGATTGCCCGACA |
| | TTATCGCGAGCCCATTTATACCCATATAAATCAGCATCCATGTTGGAATTTAAT |
| | CGCGGCCTAGAGCAAGACGTTTCCCGTTGAATATGGCTCATACTCTTCCTTTTT |
| | CAATATTATTGAAGCATTTATCAGGGTTATTGTCTCATGAGCGGATACATATTT |
| | GAATGTATTTAGAAAAATAAACAAATAGGGGTTCCGCGCACATTTCCCCGAAAA |
| | GTGCCACCTGACGTCTAAGAAACCATTATTATCATGACATTAACCTATAAAAAT |
| | AGGCGTATCACGAGGCCCTTTCGTCTCGCGCGTTTCGGTGATGACGGTGAAAAC |
| | CTCTGACACATGCAGCTCCCGGAGACGGTCACAGCTTGTCTGTAAGCGGATGCC |
| | GGGAGCAGACAAGCCCGTCAGGGCGCGTCAGCGGGTGTTGGCGGGTGTCGGGGC |
| | TGGCTTAACTATGCGGCATCAGAGCAGATTGTACTGAGAGTGCACCATATGCGG |
| | TGTGAAATACCGCACAGATGCGTAAGGAGAAAATACCGCATCAGGCGCCATTCG |
| | CCATTCAGGCTGCGCAACTGTTGGGAAGGGCGATCGGTGCGGGCCTCTTCGCTA |
| | TTACGCCAGCTGGCGAAAGGGGGATGTGCTGCAAGGCGATTAAGTTGGGTAACG |
| | CCAGGGTTTTCCCAGTCACGACGTTGTAAAACGACGGCCAGTGAATTGACGCGT |
| | ATTGGGATCGAGCTCGGTACCTAATACGACACACTATAAGGAAATAAGAGAGAA |
| | AAGAAGAGTAAGAAGAAATATAAGAGCCACCATGAGCGAGGTCGAGTTCTCTCA |
| | CGAATATTGGATGAGACACGCTCTCACCCTGGCTAAGAGAGCCAGGGACGAAAG |
| | AGAGGTGCCAGTTGGCGCTGTCCTGGTGTTGAACAATCGCGTCATCGGAGAAGG |
| | ATGGAATCGCGCCATTGGCCTGCACGATCCAACCGCACATGCCCAGATTATGGC |
| | TCTGCGGCAAGGCGGCCTCGTGATGCAAAATTACAGACTGTACGATGCTACCCT |
| | CTACTCCACCTTCGAGCCCTGTGTCATGTGTGCTGGGGCAATGATTCACTCCCG |
| | GATTGGCCGCGTGGTGTTTGGAGTGCGGAATGCCAAGACTGGCGCCGCTGGATC |
| | TCTGATGGACGTCCTGCACCATCCTGGGATGAACCACCGGGTCGAGATCACAGA |
| | GGGAATTCTGGCTGACGAGTGCGCTGCCCTGCTGTGCAGGTTCTTTAGAATGCC |
| | TAGAAGGGTGTTCAACGCCCAGAAAAAAGCTCAGAGCAGCACCGATTCCGGCGG |
| | AAGCAGCGGAGGATCTTCTGGAAGCGAAACCCCAGGCACCAGCGAGTCTGCCAC |
| | ACCAGAATCATCTGGCGGTAGCTCCGGCGGCAGCGACAAGAAGTACTCTATCGG |
| | ACTGGCCATCGGCACCAACTCTGTTGGATGGGCCGTGATCACCGACGAGTACAA |
| | GGTGCCCAGCAAGAAATTCAAGGTGCTGGGCAACACCGACCGGCACAGCATCAA |
| | GAAGAATCTGATCGGCGCCCTGCTGTTCGACTCTGGCGAAACAGCCGAAGCCAC |
| | CAGACTGAAGAGAACCGCCAGGCGGAGATACACCCGGCGGAAGAACCGGATCTG |
| | CTACCTGCAAGAGATCTTCAGCAACGAGATGGCCAAGGTGGACGACAGCTTCTT |
| | CCACAGACTGGAAGAGTCCTTCCTGGTGGAAGAGGACAAGAAGCACGAGCGGCA |
| | CCCCATCTTCGGCAACATCGTGGATGAGGTGGCCTACCACGAGAAGTACCCCAC |
| | CATCTACCACCTGAGAAAGAAACTGGTGGACAGCACCGACAAGGCCGACCTGAG |
| | ACTGATCTACCTGGCTCTGGCCCACATGATCAAGTTCCGGGGCCACTTTCTGAT |
| | CGAGGGCGATCTGAACCCCGACAACAGCGACGTGGACAAGCTGTTCATCCAGCT |
| | GGTGCAGACCTACAACCAGCTGTTCGAGGAAAACCCCATCAACGCCTCTGGCGT |
| | GGACGCCAAGGCTATCCTGTCTGCCAGACTGAGCAAGAGCAGAAGGCTGGAAAA |
| | CCTGATCGCCCAGCTGCCTGGCGAGAAGAAGAATGGCCTGTTCGGCAACCTGAT |
| | TGCCCTGAGCCTGGGACTGACCCCTAACTTCAAGAGCAACTTCGACCTGGCCGA |
| | GGATGCCAAACTGCAGCTGAGCAAGGACACCTACGACGACGACCTGGACAATCT |
| | GCTGGCCCAGATCGGCGATCAGTACGCCGACTTGTTTCTGGCCGCCAAGAACCT |
| | GTCCGACGCCATCCTGCTGAGCGATATCCTGAGAGTGAACACCGAGATCACAAA |
| | GGCCCCTCTGAGCGCCTCTATGATCAAGAGATACGACGAGCACCACCAGGATCT |
| | GACCCTGCTGAAGGCCCTCGTTAGACAGCAGCTGCCAGAGAAGTACAAAGAGAT |
| | TTTCTTCGATCAGTCCAAGAACGGCTACGCCGGCTACATTGATGGCGGAGCCAG |
| | CCAAGAGGAATTCTACAAGTTCATCAAGCCCATCCTGGAAAAGATGGACGGCAC |
| | CGAGGAACTGCTGGTCAAGCTGAACAGAGAGGACCTGCTGCGGAAGCAGCGGAC |
| | CTTCGACAATGGCTCTATCCCTCACCAGATCCACCTGGGAGAGCTGCACGCCAT |
| | TCTGCGGAGACAAGAGGACTTTTACCCATTCCTGAAGGACAACCGGGAAAAGAT |
| | CGAGAAGATCCTGACCTTCAGGATCCCCTACTACGTGGGACCACTGGCCAGAGG |
| | CAATAGCAGATTCGCCTGGATGACCAGAAAGAGCGAGGAAACCATCACACCCTG |
| | GAACTTCGAGGAAGTGGTGGACAAGGGCGCCAGCGCTCAGTCCTTCATCGAGCG |
| | GATGACCAACTTCGATAAGAACCTGCCTAACGAGAAGGTGCTGCCCAAGCACTC |
| | CCTGCTGTATGAGTACTTCACCGTGTACAACGAGCTGACCAAAGTGAAATACGT |
| | GACCGAGGGAATGAGAAAGCCCGCCTTTCTGAGCGGCGAGCAGAAAAAGGCCAT |
| | TGTGGATCTGCTGTTCAAGACCAACCGGAAAGTGACCGTGAAGCAGCTGAAAGA |
| | GGACTACTTCAAGAAAATCGAGTGCTTCGACAGCGTGGAAATCAGCGGCGTGGA |
| | AGATCGGTTCAATGCCAGCCTGGGCACATACCACGACCTGCTGAAAATTATCAA |
| | GGACAAGGACTTCCTGGACAACGAAGAGAACGAGGACATTCTCGAGGACATCGT |
| | GCTGACCCTGACACTGTTTGAGGACAGAGAGATGATCGAGGAACGGCTGAAAAC |
| | ATACGCCCACCTGTTCGACGACAAAGTGATGAAGCAACTGAAGCGGAGGCGGTA |
| | CACAGGCTGGGGCAGACTGTCTCGGAAGCTGATCAACGGCATCCGGGATAAGCA |
| | GTCCGGCAAGACAATCCTGGATTTCCTGAAGTCCGACGGCTTCGCCAACAGAAA |
| | CTTCATGCAGCTGATCCACGACGACAGCCTGACCTTTAAAGAGGACATCCAGAA |
| | AGCCCAGGTGTCCGGCCAAGGCGATTCTCTGCACGAGCACATTGCCAACCTGGC |
| | CGGATCTCCCGCCATTAAGAAGGGCATCCTGCAGACAGTGAAGGTGGTGGACGA |
| | GCTTGTGAAAGTGATGGGCAGACACAAGCCCGAGAACATCGTGATCGAAATGGC |
| | CAGAGAGAACCAGACCACACAGAAGGGCCAGAAGAACAGCCGCGAGAGAATGAA |
| | GCGGATCGAAGAGGGCATCAAAGAGCTGGGCAGCCAGATCCTGAAAGAACACCC |
| | CGTGGAAAACACCCAGCTGCAGAACGAGAAGCTGTACCTGTACTACCTGCAGAA |
| | TGGACGGGATATGTACGTGGACCAAGAGCTGGACATCAACCGGCTGAGCGACTA |
| | CGATGTGGACCATATCGTGCCCCAGAGCTTTCTGAAGGACGACTCCATCGATAA |
| | CAAGGTCCTGACCAGAAGCGACAAGAACCGGGGCAAGAGCGATAACGTGCCCTC |
| | CGAAGAGGTGGTCAAGAAGATGAAGAACTACTGGCGACAGCTGCTGAACGCCAA |
| | GCTGATTACCCAGCGGAAGTTCGATAACCTGACCAAGGCCGAGAGAGGCGGCCT |
| | GAGCGAACTTGATAAGGCCGGCTTCATTAAGCGGCAGCTGGTGGAAACCCGGCA |
| | GATCACCAAACACGTGGCACAGATTCTGGACTCCCGGATGAACACTAAGTACGA |
| | CGAGAATGACAAGCTGATCCGGGAAGTGAAAGTCATCACCCTGAAGTCTAAGCT |
| | GGTGTCCGATTTCCGGAAGGATTTCCAGTTCTACAAAGTGCGGGAAATCAACAA |
| | CTACCATCACGCCCACGACGCCTACCTGAATGCCGTTGTTGGAACAGCCCTGAT |
| | CAAGAAGTATCCCAAGCTGGAAAGCGAGTTCGTGTACGGCGACTACAAGGTGTA |
| | CGACGTGCGGAAGATGATCGCCAAGAGCGAACAAGAGATCGGCAAGGCTACCGC |
| | CAAGTACTTTTTCTACAGCAACATCATGAACTTTTTCAAGACAGAGATCACCCT |
| | GGCCAACGGCGAGATCCGGAAAAGACCCCTGATCGAGACAAACGGCGAAACCGG |
| | GGAGATCGTGTGGGATAAGGGCAGAGATTTTGCCACAGTGCGGAAAGTGCTGAG |
| | CATGCCCCAAGTGAATATCGTGAAGAAAACCGAGGTGCAGACAGGCGGCTTCAG |
| | CAAAGAGTCTATCCTGCCTAAGCGGAACAGCGATAAGCTGATCGCCAGAAAGAA |
| | GGACTGGGACCCCAAGAAATACGGCGGCTTCGTGTCTCCTACCGTGGCCTATTC |
| | TGTGCTGGTGGTGGCCAAAGTGGAAAAGGGCAAGTCCAAAAAGCTCAAGAGCGT |
| | GAAAGAGCTGCTGGGGATCACCATCATGGAAAGAAGCAGCTTTGAGAAGAACCC |
| | GATCGACTTTCTGGAAGCCAAGGGCTACAAAGAAGTCAAGAAGGACCTCATCAT |
| | CAAGCTCCCCAAGTACAGCCTGTTCGAGCTGGAAAATGGCCGGAAGCGGATGCT |
| | GGCCTCTGCTAGAGAACTGCAGAAGGGAAACGAGCTGGCCCTGCCTAGCAAATA |
| | TGTGAACTTCCTGTACCTGGCCAGCCACTATGAGAAGCTGAAGGGCAGCCCCGA |
| | GGACAATGAGCAAAAGCAGCTGTTTGTGGAACAGCACAAGCACTACCTGGACGA |
| | GATCATCGAGCAGATCAGCGAGTTCTCCAAGAGAGTGATCCTGGCCGACGCTAA |
| | CCTGGATAAGGTGCTGTCTGCCTATAACAAGCACCGGGACAAGCCTATCAGAGA |
| | GCAGGCCGAGAATATCATCCACCTGTTTACCCTGACCAACCTGGGAGCCCCTGC |
| | CGCCTTCAAGTACTTCGACACCACCATCGACCGGAAGCAGTACCGGTCCACCAA |
| | AGAGGTGCTGGACGCCACACTGATCCACCAGTCTATCACCGGCCTGTACGAAAC |
| | CCGGATCGACCTGTCTCAGCTCGGAGGCGACGAAGGCGCCGATAAGAGAACCGC |
| | CGATGGCTCTGAGTTCGAGAGCCCCAAGAAAAAGCGCAAAGTGTAATAGTGAGC |
| | GGCCGCTTAATTAAGCTGCCTTCTGCGGGGCTTGCCTTCTGGCCAAGCCCTTCT |
| | TCTCTCCCTTGCACCTGTACCTCTTGGTCTTTGAATAAAGCCTGAGTAGGAAG |
| | (SEQ ID NO: 655) |
| Amino acid | MSEVEFSHEYWMRHALTLAKRARDEREVPVGAVLVLNNRVIGEGWNRAIGLHDP |
| sequence | TAHAQIMALRQGGLVMQNYRLYDATLYSTFEPCVMCAGAMIHSRIGRVVFGVRN |
| of the | AKTGAAGSLMDVLHHPGMNHRVEITEGILADECAALLCRFFRMPRRVFNAQKKA |
| polypeptide | QSSTDSGGSSGGSSGSETPGTSESATPESSGGSSGGSDKKYSIGLAIGTNSVGW |
| encoded | AVITDEYKVPSKKFKVLGNTDRHSIKKNLIGALLFDSGETAEATRLKRTARRRY |
| by | TRRKNRICYLQEIFSNEMAKVDDSFFHRLEESFLVEEDKKHERHPIFGNIVDEV |
| mRNA2971 | AYHEKYPTIYHLRKKLVDSTDKADLRLIYLALAHMIKFRGHFLIEGDLNPDNSD |
| | VDKLFIQLVQTYNQLFEENPINASGVDAKAILSARLSKSRRLENLIAQLPGEKK |
| | NGLFGNLIALSLGLTPNFKSNFDLAEDAKLQLSKDTYDDDLDNLLAQIGDQYAD |
| | LFLAAKNLSDAILLSDILRVNTEITKAPLSASMIKRYDEHHQDLTLLKALVRQQ |
| | LPEKYKEIFFDQSKNGYAGYIDGGASQEEFYKFIKPILEKMDGTEELLVKLNRE |
| | DLLRKQRTFDNGSIPHQIHLGELHAILRRQEDFYPFLKDNREKIEKILTFRIPY |
| | YVGPLARGNSRFAWMTRKSEETITPWNFEEVVDKGASAQSFIERMTNFDKNLPN |
| | EKVLPKHSLLYEYFTVYNELTKVKYVTEGMRKPAFLSGEQKKAIVDLLFKTNRK |
| | VTVKQLKEDYFKKIECFDSVEISGVEDRFNASLGTYHDLLKIIKDKDFLDNEEN |
| | EDILEDIVLTLTLFEDREMIEERLKTYAHLFDDKVMKQLKRRRYTGWGRLSRKL |
| | INGIRDKQSGKTILDFLKSDGFANRNFMQLIHDDSLTFKEDIQKAQVSGQGDSL |
| | HEHIANLAGSPAIKKGILQTVKVVDELVKVMGRHKPENIVIEMARENQTTQKGQ |
| | KNSRERMKRIEEGIKELGSQILKEHPVENTQLQNEKLYLYYLQNGRDMYVDQEL |
| | DINRLSDYDVDHIVPQSFLKDDSIDNKVLTRSDKNRGKSDNVPSEEVVKKMKNY |
| | WRQLLNAKLITQRKFDNLTKAERGGLSELDKAGFIKRQLVETRQITKHVAQILD |
| | SRMNTKYDENDKLIREVKVITLKSKLVSDFRKDFQFYKVREINNYHHAHDAYLN |
| | AVVGTALIKKYPKLESEFVYGDYKVYDVRKMIAKSEQEIGKATAKYFFYSNIMN |
| | FFKTEITLANGEIRKRPLIETNGETGEIVWDKGRDFATVRKVLSMPQVNIVKKT |
| | EVQTGGFSKESILPKRNSDKLIARKKDWDPKKYGGFVSPTVAYSVLVVAKVEKG |
| | KSKKLKSVKELLGITIMERSSFEKNPIDFLEAKGYKEVKKDLIIKLPKYSLFEL |
| | ENGRKRMLASARELQKGNELALPSKYVNFLYLASHYEKLKGSPEDNEQKQLFVE |
| | QHKHYLDEIIEQISEFSKRVILADANLDKVLSAYNKHRDKPIREQAENIIHLFT |
| | LTNLGAPAAFKYFDTTIDRKQYRSTKEVLDATLIHQSITGLYETRIDLSQLGGD |
| | EGADKRTADGSEFESPKKKRKV (SEQ ID NO: 656) |
| Nucleotide | TCTAGAGTTTAAACATTTAAATCTGCAGATCCCAATGGCGCGCCGAGCTTGGCT |
| sequence | CGAGCATGGTCATAGCTGTTTCCTGTGTGAAATTGTTATCCGCTCACAATTCCA |
| of a | CACAACATACGAGCCGGAAGCATAAAGTGTAAAGCCTGGGGTGCCTAATGAGTG |
| plasmid | AGCTAACTCACATTAATTGCGTTGCGCTCACTGCCCGCTTTCCAGTCGGGAAAC |
| encoding | CTGTCGTGCCAGCTGCATTAATGAATCGGCCAACGCGCGGGGAGAGGCGGTTTG |
| mRNA2972 | CGTATTGGGCACTCTTGCGCTTCCTCGCTCACTGACTCGCTGCGCTCGGTCGTT |
| | CGGCTGCGGCGAGCGGTATCAGCTCACTCAAAGGCGGTAATACGGTTATCCACA |
| | GAATCAGGGGATAACGCAGGAAAGAACATGTGAGCAAAAGGCCAGCAAAAGGCC |
| | AGGAACCGTAAAAAGGCCGCGTTGCTGGCGTTTTTCCATAGGCTCCGCCCCCCT |
| | GACGAGCATCACAAAAATCGACGCTCAAGTCAGAGGTGGCGAAACCCGACAGGA |
| | CTATAAAGATACCAGGCGTTTCCCCCTGGAAGCTCCCTCGTGCGCTCTCCTGTT |
| | CCGACCCTGCCGCTTACCGGATACCTGTCCGCCTTTCTCCCTTCGGGAAGCGTG |
| | GCGCTTTCTCATAGCTCACGCTGTAGGTATCTCAGTTCGGTGTAGGTCGTTCGC |
| | TCCAAGCTGGGCTGTGTGCACGAACCCCCCGTTCAGCCCGACCGCTGCGCCTTA |
| | TCCGGTAACTATCGTCTTGAGTCCAACCCGGTAAGACACGACTTATCGCCACTG |
| | GCAGCAGCCACTGGTAACAGGATTAGCAGAGCGAGGTATGTAGGCGGTGCTACA |
| | GAGTTCTTGAAGTGGTGGCCTAACTACGGCTACACTAGAAGAACAGTATTTGGT |
| | ATCTGCGCTCTGCTGAAGCCAGTTACCTTCGGAAAAAGAGTTGGTAGCTCTTGA |
| | TCCGGCAAACAAACCACCGCTGGTAGCGGTGGTTTTTTTGTTTGCAAGCAGCAG |
| | ATTACGCGCAGAAAAAAAGGATCTCAAGAAGATCCTTTGATCTTTTCTACGGGG |
| | TCTGACGCTCAGTGGAACGAAAACTCACGTTAAGGGATTTTGGTCATGAGATTA |
| | TCAAAAAGGATCTTCACCTAGATCCTTTTAAATTAAAAATGAAGTTTTAAATCA |
| | ATCTAAAGTATATATGAGTAAACTTGGTCTGACAGTTAGAAAAACTCATCGAGC |
| | ATCAAATGAAACTGCAATTTATTCATATCAGGATTATCAATACCATATTTTTGA |
| | AAAAGCCGTTTCTGTAATGAAGGAGAAAACTCACCGAGGCAGTTCCATAGGATG |
| | GCAAGATCCTGGTATCGGTCTGCGATTCCGACTCGTCCAACATCAATACAACCT |
| | ATTAATTTCCCCTCGTCAAAAATAAGGTTATCAAGTGAGAAATCACCATGAGTG |
| | ACGACTGAATCCGGTGAGAATGGCAAAAGTTTATGCATTTCTTTCCAGACTTGT |
| | TCAACAGGCCAGCCATTACGCTCGTCATCAAAATCACTCGCATCAACCAAACCG |
| | TTATTCATTCGTGATTGCGCCTGAGCGAGACGAAATACGCGATCGCTGTTAAAA |
| | GGACAATTACAAACAGGAATCGAATGCAACCGGCGCAGGAACACTGCCAGCGCA |
| | TCAACAATATTTTCACCTGAATCAGGATATTCTTCTAATACCTGGAATGCTGTT |
| | TTCCCAGGGATCGCAGTGGTGAGTAACCATGCATCATCAGGAGTACGGATAAAA |
| | TGCTTGATGGTCGGAAGAGGCATAAATTCCGTCAGCCAGTTTAGTCTGACCATC |
| | TCATCTGTAACATCATTGGCAACGCTACCTTTGCCATGTTTCAGAAACAACTCT |
| | GGCGCATCGGGCTTCCCATACAATCGATAGATTGTCGCACCTGATTGCCCGACA |
| | TTATCGCGAGCCCATTTATACCCATATAAATCAGCATCCATGTTGGAATTTAAT |
| | CGCGGCCTAGAGCAAGACGTTTCCCGTTGAATATGGCTCATACTCTTCCTTTTT |
| | CAATATTATTGAAGCATTTATCAGGGTTATTGTCTCATGAGCGGATACATATTT |
| | GAATGTATTTAGAAAAATAAACAAATAGGGGTTCCGCGCACATTTCCCCGAAAA |
| | GTGCCACCTGACGTCTAAGAAACCATTATTATCATGACATTAACCTATAAAAAT |
| | AGGCGTATCACGAGGCCCTTTCGTCTCGCGCGTTTCGGTGATGACGGTGAAAAC |
| | CTCTGACACATGCAGCTCCCGGAGACGGTCACAGCTTGTCTGTAAGCGGATGCC |
| | GGGAGCAGACAAGCCCGTCAGGGCGCGTCAGCGGGTGTTGGCGGGTGTCGGGGC |
| | TGGCTTAACTATGCGGCATCAGAGCAGATTGTACTGAGAGTGCACCATATGCGG |
| | TGTGAAATACCGCACAGATGCGTAAGGAGAAAATACCGCATCAGGCGCCATTCG |
| | CCATTCAGGCTGCGCAACTGTTGGGAAGGGCGATCGGTGCGGGCCTCTTCGCTA |
| | TTACGCCAGCTGGCGAAAGGGGGATGTGCTGCAAGGCGATTAAGTTGGGTAACG |
| | CCAGGGTTTTCCCAGTCACGACGTTGTAAAACGACGGCCAGTGAATTGACGCGT |
| | ATTGGGATCGAGCTCGGTACCTAATACGACACACTATAAGGAAATAAGAGAGAA |
| | AAGAAGAGTAAGAAGAAATATAAGAGCCACCATGAGCGAGGTCGAGTTCTCTCA |
| | CGAATATTGGATGAGACACGCTCTCACCCTGGCTAAGAGAGCCAGGGACGAAAG |
| | AGAGGTGCCAGTTGGCGCTGTCCTGGTGTTGAACAATCGCGTCATCGGAGAAGG |
| | ATGGAATCGCGCCATTGGCCTGCACGATCCAACCGCACATGCCCAGATTATGGC |
| | TCTGCGGCAAGGCGGCCTCGTGATGCAAAATTACAGACTGTACGATGCTACCCT |
| | CTACTCCACCTTCGAGCCCTGTGTCATGTGTGCTGGGGCAATGATTCACTCCCG |
| | GATTGGCCGCGTGGTGTTTGGAGTGCGGAATGCCAAGACTGGCGCCGCTGGATC |
| | TCTGATGGACGTCCTGCACCATCCTGGGATGAACCACCGGGTCGAGATCACAGA |
| | GGGAATTCTGGCTGACGAGTGCGCTGCCCTGCTGTGCAGGTTCTTTAGAATGCC |
| | TAGAAGGGTGTTCAACGCCCAGAAAAAAGCTCAGAGCAGCACCGATTCCGGCGG |
| | AAGCAGCGGAGGATCTTCTGGAAGCGAAACCCCAGGCACCAGCGAGTCTGCCAC |
| | ACCAGAATCATCTGGCGGTAGCTCCGGCGGCAGCAAGAGAAATTACATCCTGGG |
| | CCTCGCCATCGGCATCACCTCTGTCGGCTACGGCATCATCGACTACGAGACACG |
| | GGATGTGATTGATGCCGGCGTGCGGCTGTTCAAAGAGGCCAACGTCGAGAACAA |
| | CGAGGGCCGCAGATCTAAGAGGGGAGCCAGACGGCTGAAGAGAAGGCGGAGACA |
| | CAGAATCCAGAGAGTGAAGAAGCTGCTGTTCGACTACAACCTGCTGACCGACCA |
| | CAGCGAGCTGAGCGGCATCAACCCTTATGAGGCCAGAGTGAAGGGCCTGAGCCA |
| | GAAGCTGAGCGAGGAAGAGTTTAGCGCCGCACTGCTGCACCTGGCCAAGAGAAG |
| | AGGCGTGCACAACGTGAACGAAGTGGAAGAGGACACCGGCAACGAGCTGTCCAC |
| | CAAAGAGCAGATCAGCAGAAACAGCAAGGCCCTGGAAGAGAAATACGTGGCCGA |
| | ACTGCAGCTGGAACGGCTGAAAAAGGATGGCGAAGTGCGGGGCAGCATCAACCG |
| | GTTCAAGACCAGCGACTACGTGAAAGAAGCCAAACAGCTGCTGAAGGTGCAGAA |
| | GGCCTACCACCAGCTGGACCAGAGCTTCATCGACACCTACATCGACCTGCTGGA |
| | AACCCGGCGGACCTACTATGAAGGACCTGGCGAGGGAAGCCCCTTCGGCTGGAA |
| | GGACATCAAAGAATGGTACGAGATGCTGATGGGCCACTGCACCTACTTTCCCGA |
| | GGAACTGCGGAGCGTGAAGTACGCCTACAACGCCGACCTGTACAACGCCCTGAA |
| | CGACCTGAACAACCTCGTGATCACCCGGGACGAGAACGAGAAGCTGGAATATTA |
| | CGAGAAGTTCCAGATCATCGAGAACGTGTTCAAGCAGAAGAAGAAGCCCACACT |
| | GAAGCAGATCGCCAAAGAGATCCTGGTCAACGAGGAAGATATCAAGGGCTACAG |
| | AGTGACCAGCACCGGCAAGCCCGAGTTCACCAACCTGAAGGTGTACCACGACAT |
| | CAAGGATATCACAGCCCGGAAAGAGATTATTGAGAACGCCGAGCTGCTGGACCA |
| | AATCGCCAAGATCCTGACCATCTACCAGTCCTCCGAGGACATCCAAGAGGAACT |
| | GACCAATCTGAACTCCGAGCTGACCCAAGAAGAGATCGAGCAGATCTCTAATCT |
| | GAAGGGGTACACAGGCACCCACAACCTGAGCCTGAAGGCCATCAACCTGATCCT |
| | GGACGAGCTGTGGCACACCAACGACAACCAGATTGCCATCTTCAACCGGCTGAA |
| | GCTGGTGCCCAAGAAGGTGGACCTCAGCCAGCAGAAAGAAATCCCCACCACACT |
| | GGTGGACGACTTCATTCTGAGCCCCGTGGTCAAGAGAAGCTTCATCCAGAGCAT |
| | CAAAGTGATCAACGCCATCATCAAGAAGTACGGGCTGCCCAACGATATCATCAT |
| | CGAGCTGGCCCGCGAGAAGAACTCCAAGGACGCTCAGAAAATGATCAACGAGAT |
| | GCAGAAGCGGAACCGGCAGACCAACGAGCGGATCGAGGAAATCATCCGGACCAC |
| | CGGCAAAGAGAACGCCAAGTACCTGATCGAGAAGATCAAGCTGCACGACATGCA |
| | AGAGGGCAAGTGTCTGTACAGCCTGGAAGCCATTCCTCTGGAAGATCTGCTGAA |
| | CAATCCCTTCAACTACGAGGTGGACCACATCATCCCCAGAAGCGTGTCCTTCGA |
| | CAACAGCTTCAACAACAAGGTGCTCGTGAAGCAAGAGGAAAACTCCAAGAAGGG |
| | CAACAGAACCCCATTCCAGTACCTGAGCAGCTCCGACAGCAAAATCAGCTACGA |
| | AACCTTCAAGAAGCACATCCTGAATCTGGCCAAAGGCAAGGGCCGCATCAGCAA |
| | GACCAAGAAAGAATACCTGCTCGAGGAACGGGACATCAACAGATTCAGCGTGCA |
| | GAAAGACTTCATCAATCGGAACCTGGTGGACACCAGATACGCCACCAGAGGCCT |
| | GATGAATCTGCTGAGAAGCTACTTCCGCGTGAACAATCTGGACGTGAAAGTCAA |
| | GTCCATCAACGGCGGCTTCACCAGCTTTCTGCGGAGAAAGTGGAAGTTCAAGAA |
| | AGAGCGGAACAAGGGCTATAAGCACCACGCCGAGGACGCCCTGATCATTGCCAA |
| | CGCCGATTTCATCTTCAAAGAGTGGAAGAAACTGGACAAGGCCAAAAAAGTGAT |
| | GGAAAACCAGATGTTCGAGGAAAAGCAGGCCGAGAGCATGCCCGAGATCGAAAC |
| | CGAGCAAGAGTACAAAGAGATTTTCATCACGCCCCACCAGATCAAGCACATTAA |
| | GGACTTCAAGGACTACAAGTACAGCCACCGCGTGGACAAGAAGCCTAATAGAGA |
| | GCTGATTAACGACACCCTGTACAGCACCCGGAAGGACGACAAGGGCAATACCCT |
| | GATCGTCAACAACCTGAACGGCCTGTACGACAAGGACAACGACAAGCTCAAGAA |
| | GCTGATCAACAAGAGCCCCGAGAAACTGCTGATGTACCACCACGATCCTCAGAC |
| | CTACCAGAAACTGAAGCTCATCATGGAACAGTACGGCGACGAGAAGAATCCCCT |
| | GTACAAGTACTACGAGGAAACCGGGAACTACCTGACCAAGTACTCCAAAAAGGA |
| | CAATGGGCCCGTGATCAAGAAGATTAAGTATTACGGCAACAAGCTGAATGCCCA |
| | CCTGGACATCACCGACGACTACCCCAACTCCAGAAACAAGGTGGTCAAGCTGTC |
| | CCTGAAGCCTTACAGATTCGACGTGTACCTGGACAACGGCGTGTACAAGTTCGT |
| | GACCGTGAAGAACCTGGATGTGATCAAAAAAGAAAACTACTACGAAGTGAACAG |
| | CAAGTGCTATGAGGAAGCCAAGAAACTCAAGAAAATCAGCAACCAGGCCGAGTT |
| | TATCGCCTCCTTCTACAACAACGATCTGATCAAGATCAACGGGGAGCTGTATAG |
| | AGTGATTGGGGTCAACAATGACCTGCTGAACCGGATCGAAGTCAACATGATCGA |
| | CATCACCTACCGCGAGTACCTCGAGAACATGAACGACAAGAGGCCTCCACGGAT |
| | CATTAAGACAATCGCCAGCAAGACGCAGAGCATTAAGAAGTACAGCACTGACAT |
| | TCTGGGCAACCTGTACGAAGTCAAGAGCAAAAAGCACCCGCAGATTATCAAGAA |
| | AGGCGAGGGCGCCGACAAGAGAACAGCCGATGGTTCCGAGTTCGAAAGCCCCAA |
| | GAAGAAGAGGAAAGTCTAATAGTGAGCGGCCGCTTAATTAAGCTGCCTTCTGCG |
| | GGGCTTGCCTTCTGGCCAAGCCCTTCTTCTCTCCCTTGCACCTGTACCTCTTGG |
| | TCTTTGAATAAAGCCTGAGTAGGAAG (SEQ ID NO: 657) |
| Amino acid | MSEVEFSHEYWMRHALTLAKRARDEREVPVGAVLVLNNRVIGEGWNRAIGLHDP |
| sequence | TAHAQIMALRQGGLVMQNYRLYDATLYSTFEPCVMCAGAMIHSRIGRVVFGVRN |
| of the | AKTGAAGSLMDVLHHPGMNHRVEITEGILADECAALLCRFFRMPRRVFNAQKKA |
| polypeptide | QSSTDSGGSSGGSSGSETPGTSESATPESSGGSSGGSKRNYILGLAIGITSVGY |
| encoded | GIIDYETRDVIDAGVRLFKEANVENNEGRRSKRGARRLKRRRRHRIQRVKKLLF |
| by | DYNLLTDHSELSGINPYEARVKGLSQKLSEEEFSAALLHLAKRRGVHNVNEVEE |
| mRNA2972 | DTGNELSTKEQISRNSKALEEKYVAELQLERLKKDGEVRGSINRFKTSDYVKEA |
| | KQLLKVQKAYHQLDQSFIDTYIDLLETRRTYYEGPGEGSPFGWKDIKEWYEMLM |
| | GHCTYFPEELRSVKYAYNADLYNALNDLNNLVITRDENEKLEYYEKFQIIENVF |
| | KQKKKPTLKQIAKEILVNEEDIKGYRVTSTGKPEFTNLKVYHDIKDITARKEII |
| | ENAELLDQIAKILTIYQSSEDIQEELTNLNSELTQEEIEQISNLKGYTGTHNLS |
| | LKAINLILDELWHTNDNQIAIFNRLKLVPKKVDLSQQKEIPTTLVDDFILSPVV |
| | KRSFIQSIKVINAIIKKYGLPNDIIIELAREKNSKDAQKMINEMQKRNRQTNER |
| | IEEIIRTTGKENAKYLIEKIKLHDMQEGKCLYSLEAIPLEDLLNNPFNYEVDHI |
| | IPRSVSFDNSFNNKVLVKQEENSKKGNRTPFQYLSSSDSKISYETFKKHILNLA |
| | KGKGRISKTKKEYLLEERDINRFSVQKDFINRNLVDTRYATRGLMNLLRSYFRV |
| | NNLDVKVKSINGGFTSFLRRKWKFKKERNKGYKHHAEDALIIANADFIFKEWKK |
| | LDKAKKVMENQMFEEKQAESMPEIETEQEYKEIFITPHQIKHIKDFKDYKYSHR |
| | VDKKPNRELINDTLYSTRKDDKGNTLIVNNLNGLYDKDNDKLKKLINKSPEKLL |
| | MYHHDPQTYQKLKLIMEQYGDEKNPLYKYYEETGNYLTKYSKKDNGPVIKKIKY |
| | YGNKLNAHLDITDDYPNSRNKVVKLSLKPYRFDVYLDNGVYKFVTVKNLDVIKK |
| | ENYYEVNSKCYEEAKKLKKISNQAEFIASFYNNDLIKINGELYRVIGVNNDLLN |
| | RIEVNMIDITYREYLENMNDKRPPRIIKTIASKTQSIKKYSTDILGNLYEVKSK |
| | KHPQIIKKGEGADKRTADGSEFESPKKKRKV (SEQ ID NO: 658) |
| Nucleotide | TCTAGAGTTTAAACATTTAAATCTGCAGATCCCAATGGCGCGCCGAGCTTGGCT |
| sequence | CGAGCATGGTCATAGCTGTTTCCTGTGTGAAATTGTTATCCGCTCACAATTCCA |
| of a | CACAACATACGAGCCGGAAGCATAAAGTGTAAAGCCTGGGGTGCCTAATGAGTG |
| plasmid | AGCTAACTCACATTAATTGCGTTGCGCTCACTGCCCGCTTTCCAGTCGGGAAAC |
| encoding | CTGTCGTGCCAGCTGCATTAATGAATCGGCCAACGCGCGGGGAGAGGCGGTTTG |
| mRNA2973 | CGTATTGGGCACTCTTGCGCTTCCTCGCTCACTGACTCGCTGCGCTCGGTCGTT |
| | CGGCTGCGGCGAGCGGTATCAGCTCACTCAAAGGCGGTAATACGGTTATCCACA |
| | GAATCAGGGGATAACGCAGGAAAGAACATGTGAGCAAAAGGCCAGCAAAAGGCC |
| | AGGAACCGTAAAAAGGCCGCGTTGCTGGCGTTTTTCCATAGGCTCCGCCCCCCT |
| | GACGAGCATCACAAAAATCGACGCTCAAGTCAGAGGTGGCGAAACCCGACAGGA |
| | CTATAAAGATACCAGGCGTTTCCCCCTGGAAGCTCCCTCGTGCGCTCTCCTGTT |
| | CCGACCCTGCCGCTTACCGGATACCTGTCCGCCTTTCTCCCTTCGGGAAGCGTG |
| | GCGCTTTCTCATAGCTCACGCTGTAGGTATCTCAGTTCGGTGTAGGTCGTTCGC |
| | TCCAAGCTGGGCTGTGTGCACGAACCCCCCGTTCAGCCCGACCGCTGCGCCTTA |
| | TCCGGTAACTATCGTCTTGAGTCCAACCCGGTAAGACACGACTTATCGCCACTG |
| | GCAGCAGCCACTGGTAACAGGATTAGCAGAGCGAGGTATGTAGGCGGTGCTACA |
| | GAGTTCTTGAAGTGGTGGCCTAACTACGGCTACACTAGAAGAACAGTATTTGGT |
| | ATCTGCGCTCTGCTGAAGCCAGTTACCTTCGGAAAAAGAGTTGGTAGCTCTTGA |
| | TCCGGCAAACAAACCACCGCTGGTAGCGGTGGTTTTTTTGTTTGCAAGCAGCAG |
| | ATTACGCGCAGAAAAAAAGGATCTCAAGAAGATCCTTTGATCTTTTCTACGGGG |
| | TCTGACGCTCAGTGGAACGAAAACTCACGTTAAGGGATTTTGGTCATGAGATTA |
| | TCAAAAAGGATCTTCACCTAGATCCTTTTAAATTAAAAATGAAGTTTTAAATCA |
| | ATCTAAAGTATATATGAGTAAACTTGGTCTGACAGTTAGAAAAACTCATCGAGC |
| | ATCAAATGAAACTGCAATTTATTCATATCAGGATTATCAATACCATATTTTTGA |
| | AAAAGCCGTTTCTGTAATGAAGGAGAAAACTCACCGAGGCAGTTCCATAGGATG |
| | GCAAGATCCTGGTATCGGTCTGCGATTCCGACTCGTCCAACATCAATACAACCT |
| | ATTAATTTCCCCTCGTCAAAAATAAGGTTATCAAGTGAGAAATCACCATGAGTG |
| | ACGACTGAATCCGGTGAGAATGGCAAAAGTTTATGCATTTCTTTCCAGACTTGT |
| | TCAACAGGCCAGCCATTACGCTCGTCATCAAAATCACTCGCATCAACCAAACCG |
| | TTATTCATTCGTGATTGCGCCTGAGCGAGACGAAATACGCGATCGCTGTTAAAA |
| | GGACAATTACAAACAGGAATCGAATGCAACCGGCGCAGGAACACTGCCAGCGCA |
| | TCAACAATATTTTCACCTGAATCAGGATATTCTTCTAATACCTGGAATGCTGTT |
| | TTCCCAGGGATCGCAGTGGTGAGTAACCATGCATCATCAGGAGTACGGATAAAA |
| | TGCTTGATGGTCGGAAGAGGCATAAATTCCGTCAGCCAGTTTAGTCTGACCATC |
| | TCATCTGTAACATCATTGGCAACGCTACCTTTGCCATGTTTCAGAAACAACTCT |
| | GGCGCATCGGGCTTCCCATACAATCGATAGATTGTCGCACCTGATTGCCCGACA |
| | TTATCGCGAGCCCATTTATACCCATATAAATCAGCATCCATGTTGGAATTTAAT |
| | CGCGGCCTAGAGCAAGACGTTTCCCGTTGAATATGGCTCATACTCTTCCTTTTT |
| | CAATATTATTGAAGCATTTATCAGGGTTATTGTCTCATGAGCGGATACATATTT |
| | GAATGTATTTAGAAAAATAAACAAATAGGGGTTCCGCGCACATTTCCCCGAAAA |
| | GTGCCACCTGACGTCTAAGAAACCATTATTATCATGACATTAACCTATAAAAAT |
| | AGGCGTATCACGAGGCCCTTTCGTCTCGCGCGTTTCGGTGATGACGGTGAAAAC |
| | CTCTGACACATGCAGCTCCCGGAGACGGTCACAGCTTGTCTGTAAGCGGATGCC |
| | GGGAGCAGACAAGCCCGTCAGGGCGCGTCAGCGGGTGTTGGCGGGTGTCGGGGC |
| | TGGCTTAACTATGCGGCATCAGAGCAGATTGTACTGAGAGTGCACCATATGCGG |
| | TGTGAAATACCGCACAGATGCGTAAGGAGAAAATACCGCATCAGGCGCCATTCG |
| | CCATTCAGGCTGCGCAACTGTTGGGAAGGGCGATCGGTGCGGGCCTCTTCGCTA |
| | TTACGCCAGCTGGCGAAAGGGGGATGTGCTGCAAGGCGATTAAGTTGGGTAACG |
| | CCAGGGTTTTCCCAGTCACGACGTTGTAAAACGACGGCCAGTGAATTGACGCGT |
| | ATTGGGATCGAGCTCGGTACCTAATACGACACACTATAAGGAAATAAGAGAGAA |
| | AAGAAGAGTAAGAAGAAATATAAGAGCCACCATGAGCGAGGTCGAGTTCTCTCA |
| | CGAATATTGGATGAGACACGCTCTCACCCTGGCTAAGAGAGCCAGGGACGAAAG |
| | AGAGGTGCCAGTTGGCGCTGTCCTGGTGTTGAACAATCGCGTCATCGGAGAAGG |
| | ATGGAATCGCGCCATTGGCCTGCACGATCCAACCGCACATGCCCAGATTATGGC |
| | TCTGCGGCAAGGCGGCCTCGTGATGCAAAATTACAGACTGTACGATGCTACCCT |
| | CTACTCCACCTTCGAGCCCTGTGTCATGTGTGCTGGGGCAATGATTCACTCCCG |
| | GATTGGCCGCGTGGTGTTTGGAGTGCGGAATGCCAAGACTGGCGCCGCTGGATC |
| | TCTGATGGACGTCCTGCACCATCCTGGGATGAACCACCGGGTCGAGATCACAGA |
| | GGGAATTCTGGCTGACGAGTGCGCTGCCCTGCTGTGCAGGTTCTTTAGAATGCC |
| | TAGAAGGGTGTTCAACGCCCAGAAAAAAGCTCAGAGCAGCACCGATTCCGGCGG |
| | AAGCAGCGGAGGATCTTCTGGAAGCGAAACCCCAGGCACCAGCGAGTCTGCCAC |
| | ACCAGAATCATCTGGCGGTAGCTCCGGCGGCAGCAAGAGAAATTACATCCTCGG |
| | ACTGGCCATCGGCATCACCTCTGTCGGCTACGGCATCATCGACTACGAGACACG |
| | GGACGTGATCGATGCCGGCGTGCGGCTGTTTAAAGAGGCCAACGTCGAGAACAA |
| | CGAGGGCCGCAGATCTAAGAGAGGCGCCAGACGGCTGAAGAGAAGAAGAAGGCA |
| | CCGGATCCAGAGAGTGAAGAAGCTGCTGTTCGACTACAACCTGCTGACCGACCA |
| | CAGCGAGCTGAGCGGCATCAATCCTTACGAGGCCAGAGTGAAGGGCCTGAGCCA |
| | GAAGCTGAGCGAGGAAGAGTTTAGCGCTGCCCTGCTGCACCTGGCCAAGAGAAG |
| | AGGCGTGCACAACGTGAACGAGGTGGAAGAGGACACCGGCAACGAGCTGTCCAC |
| | CAAAGAGCAGATCAGCCGGAACAGCAAGGCCCTGGAAGAGAAATACGTGGCCGA |
| | ACTGCAGCTGGAACGGCTGAAAAAGGATGGCGAAGTGCGGGGCAGCATCAACCG |
| | GTTCAAGACCAGCGACTACGTGAAAGAAGCCAAACAGCTGCTGAAGGTGCAGAA |
| | GGCCTACCACCAGCTGGACCAGAGCTTCATCGACACCTACATCGACCTGCTGGA |
| | AACCCGGCGGACCTACTATGAAGGACCTGGCGAGGGAAGCCCCTTCGGCTGGAA |
| | GGACATCAAAGAATGGTACGAGATGCTGATGGGCCACTGCACCTACTTTCCCGA |
| | GGAACTGCGGAGCGTGAAGTACGCCTACAACGCCGACCTGTACAACGCCCTGAA |
| | CGACCTGAACAACCTCGTGATCACCCGGGACGAGAACGAGAAGCTGGAATATTA |
| | CGAGAAGTTCCAAATCATCGAGAACGTGTTCAAGCAGAAGAAAAAGCCCACGCT |
| | GAAGCAGATCGCCAAAGAGATCCTGGTCAACGAGGAAGATATCAAGGGCTACAG |
| | AGTGACCAGCACCGGCAAGCCCGAGTTCACCAACCTGAAGGTGTACCACGACAT |
| | CAAGGATATCACAGCCCGGAAAGAAATCATTGAGAATGCCGAGCTGCTCGACCA |
| | GATTGCCAAGATCCTGACCATCTACCAGAGCAGCGAGGACATCCAAGAGGAACT |
| | GACCAATCTGAACTCCGAGCTGACCCAAGAAGAGATCGAACAGATCAGCAATCT |
| | GAAGGGGTACACCGGCACACACAACCTGAGCCTGAAGGCCATCAACCTGATCCT |
| | GGACGAGCTGTGGCACACCAACGACAACCAGATCGCTATCTTCAACCGGCTGAA |
| | GCTGGTGCCCAAGAAGGTGGACCTGTCTCAGCAGAAAGAGATTCCCACCACACT |
| | GGTGGACGACTTCATTCTGAGCCCCGTGGTCAAGAGAAGCTTCATCCAGAGCAT |
| | CAAAGTGATCAACGCCATCATCAAGAAGTACGGGCTGCCCAACGATATCATCAT |
| | CGAGCTGGCCCGCGAGAAGAACTCCAAGGACGCCCAGAAAATGATCAACGAGAT |
| | GCAGAAGCGGAACCGGCAGACCAACGAGCGGATCGAGGAAATCATCCGGACCAC |
| | CGGCAAAGAGAACGCCAAGTACCTGATCGAGAAGATCAAGCTGCACGACATGCA |
| | AGAGGGCAAGTGCCTGTACAGCCTGGAAGCCATTCCTCTGGAAGATCTGCTGAA |
| | CAATCCCTTCAACTATGAGGTGGACCACATCATCCCCAGAAGCGTGTCCTTCGA |
| | CAACAGCTTCAACAACAAGGTGCTCGTGAAGCAAGAGGAAAACAGCAAGAAGGG |
| | CAACAGAACCCCATTCCAGTACCTGAGCAGCTCCGACAGCAAGATCAGCTACGA |
| | AACCTTCAAGAAGCACATCCTGAATCTGGCCAAAGGCAAGGGCAGAATCAGCAA |
| | GACCAAGAAAGAGTATCTGCTCGAGGAACGGGACATCAACAGATTCAGCGTGCA |
| | GAAAGACTTCATCAATCGGAACCTGGTGGACACCAGATACGCCACCAGAGGCCT |
| | GATGAATCTGCTGCGGAGCTACTTCAGAGTGAACAATCTGGACGTGAAAGTCAA |
| | GTCCATCAACGGCGGCTTCACCAGCTTTCTGCGGCGGAAGTGGAAGTTTAAGAA |
| | AGAGCGGAACAAGGGCTATAAGCACCATGCCGAGGACGCCCTGATCATTGCCAA |
| | CGCCGATTTCATCTTCAAAGAGTGGAAGAAACTGGACAAGGCCAAAAAAGTGAT |
| | GGAAAACCAGATGTTCGAGGAAAAGCAGGCCGAGAGCATGCCCGAGATCGAGAC |
| | TGAGCAAGAGTACAAAGAGATTTTCATCACGCCCCACCAGATCAAGCACATTAA |
| | GGACTTCAAGGACTACAAGTACAGCCACCGCGTGGACAAGAAGCCCAACCGGAA |
| | GCTGATCAATGACACACTGTACAGCACCCGGAAGGACGACAAGGGCAATACCCT |
| | GATCGTCAACAACCTGAACGGCCTGTACGACAAGGACAACGACAAGCTCAAGAA |
| | GCTGATTAACAAGAGCCCCGAGAAGCTCCTGATGTACCATCACGACCCTCAGAC |
| | CTACCAGAAACTGAAGCTCATCATGGAACAGTACGGCGACGAGAAAAACCCGCT |
| | GTACAAGTACTACGAGGAAACCGGAAACTACCTGACCAAGTACTCCAAAAAGGA |
| | CAATGGGCCCGTGATCAAGAAGATTAAGTATTACGGCAACAAGCTGAATGCCCA |
| | CCTGGACATCACCGACGACTACCCCAACAGCAGAAACAAGGTGGTCAAGCTGTC |
| | CCTGAAGCCTTACAGATTCGACGTGTACCTGGACAACGGCGTGTACAAGTTCGT |
| | GACCGTGAAGAACCTGGACGTCATCAAAAAAGAAAACTACTACGAAGTCAACAG |
| | CAAGTGCTATGAGGAAGCCAAGAAACTCAAGAAAATCAGCAACCAGGCCGAGTT |
| | TATCGCCAGCTTCTACAAGAACGACCTCATCAAGATCAACGGGGAGCTGTATAG |
| | AGTGATCGGGGTCAACAATGACCTGCTGAACCGGATCGAAGTGAACATGATCGA |
| | CATCACCTACCGCGAGTACCTCGAGAACATGAACGATAAGCGGCCACCGCACAT |
| | CATTAAGACAATCGCCAGCAAGACGCAGAGCATTAAGAAGTACAGCACAGACAT |
| | CCTGGGGAACCTGTACGAAGTGAAGTCCAAAAAGCACCCGCAGATTATCAAGAA |
| | AGGCGGCAGCCCCAAGAAAAAAAGAAAGGTTTCCTCCGACTACAAGGACCACGA |
| | TGGCGATTATAAGGATCACGACATCGATTACAAGGACGATGACGACAAGGAAGG |
| | CGCCGATAAGAGAACCGCCGATGGCTCTGAGTTCGAGAGCCCCAAGAAAAAGCG |
| | CAAAGTGTAATAGTGAGCGGCCGCTTAATTAAGCTGCCTTCTGCGGGGCTTGCC |
| | TTCTGGCCAAGCCCTTCTTCTCTCCCTTGCACCTGTACCTCTTGGTCTTTGAAT |
| | AAAGCCTGAGTAGGAAG (SEQ ID NO: 659) |
| Amino acid | MSEVEFSHEYWMRHALTLAKRARDEREVPVGAVLVLNNRVIGEGWNRAIGLHDP |
| sequence | TAHAQIMALRQGGLVMQNYRLYDATLYSTFEPCVMCAGAMIHSRIGRVVFGVRN |
| of the | AKTGAAGSLMDVLHHPGMNHRVEITEGILADECAALLCRFFRMPRRVFNAQKKA |
| polypeptide | QSSTDSGGSSGGSSGSETPGTSESATPESSGGSSGGSKRNYILGLAIGITSVGY |
| encoded | GIIDYETRDVIDAGVRLFKEANVENNEGRRSKRGARRLKRRRRHRIQRVKKLLF |
| by | DYNLLTDHSELSGINPYEARVKGLSQKLSEEEFSAALLHLAKRRGVHNVNEVEE |
| mRNA2973 | DTGNELSTKEQISRNSKALEEKYVAELQLERLKKDGEVRGSINRFKTSDYVKEA |
| | KQLLKVQKAYHQLDQSFIDTYIDLLETRRTYYEGPGEGSPFGWKDIKEWYEMLM |
| | GHCTYFPEELRSVKYAYNADLYNALNDLNNLVITRDENEKLEYYEKFQIIENVF |
| | KQKKKPTLKQIAKEILVNEEDIKGYRVTSTGKPEFTNLKVYHDIKDITARKEII |
| | ENAELLDQIAKILTIYQSSEDIQEELTNLNSELTQEEIEQISNLKGYTGTHNLS |
| | LKAINLILDELWHTNDNQIAIFNRLKLVPKKVDLSQQKEIPTTLVDDFILSPVV |
| | KRSFIQSIKVINAIIKKYGLPNDIIIELAREKNSKDAQKMINEMQKRNRQTNER |
| | IEEIIRTTGKENAKYLIEKIKLHDMQEGKCLYSLEAIPLEDLLNNPFNYEVDHI |
| | IPRSVSFDNSFNNKVLVKQEENSKKGNRTPFQYLSSSDSKISYETFKKHILNLA |
| | KGKGRISKTKKEYLLEERDINRFSVQKDFINRNLVDTRYATRGLMNLLRSYFRV |
| | NNLDVKVKSINGGFTSFLRRKWKFKKERNKGYKHHAEDALIIANADFIFKEWKK |
| | LDKAKKVMENQMFEEKQAESMPEIETEQEYKEIFITPHQIKHIKDFKDYKYSHR |
| | VDKKPNRKLINDTLYSTRKDDKGNTLIVNNLNGLYDKDNDKLKKLINKSPEKLL |
| | MYHHDPQTYQKLKLIMEQYGDEKNPLYKYYEETGNYLTKYSKKDNGPVIKKIKY |
| | YGNKLNAHLDITDDYPNSRNKVVKLSLKPYRFDVYLDNGVYKFVTVKNLDVIKK |
| | ENYYEVNSKCYEEAKKLKKISNQAEFIASFYKNDLIKINGELYRVIGVNNDLLN |
| | RIEVNMIDITYREYLENMNDKRPPHIIKTIASKTQSIKKYSTDILGNLYEVKSK |
| | KHPQIIKKGGSPKKKRKVSSDYKDHDGDYKDHDIDYKDDDDKEGADKRTADGSE |
| | FESPKKKRKV (SEQ ID NO: 660) |

### Example 4. Impact of Base Editing on SMN Polypeptide Expression

[0972] Experiments were undertaken to evaluate the impact of base editing of SMN2 in SMA patient fibroblast cells (GM03813 cells) on SMN polypeptide expression.

[0973] First, as a control experiment, spinal muscular atrophy (SMA) patient fibroblast cells (GM03813 cells) were transfected using Lipofectamine MessangerMAX and 0 nM, 1 nM, 10 nM, or 100 nM of the antisense oligonucleotide (ASO) nusinersen, which is known to improve levels of spliced SMN2 transcripts containing Exon 7 expressed in cells. Increasing concentrations of nusinersen was directly correlated with increased full-length SMN2 transcripts expressed in the cells (FIGS. 14A and 14B).

[0974] Next, an experiment was undertaken to evaluate the impact of nusinersen and base editing on SMN polypeptide levels (SMN levels) in SMA patient fibroblast cells (GM03813 cells). The base edited SMA patient fibroblast cells were transduced with mRNA encoding a cytidine base editor and the guide polynucleotide gRNA1962. SMN polypeptide levels were evaluated 5 days following transfection with the base editor system or following being transfected with nusinersen using an enzyme-linked immunosorbent assay (FIG. 15). Base edited cells had SMN polypeptide expression levels comparable to levels achieved in cells contacted with 10 nM nusinersen.

[0975] A further experiment was undertaken to evaluate the impact of base editing on SMN polypeptide levels (SMN levels) in SMA patient fibroblast cells (GM03813 cells). The base edited SMA patient fibroblast cells were prepared using the following base editor systems: CBE+gRNA1962; ABE+gRNA1962; ABE+gRNA1973; ABE+gRNA2349; and CBE+gRNA1977 (FIG. 22). Cells were transduced with mRNA encoding the base editor and the guide polynucleotide. All of the base editor systems achieved base editing efficiencies of greater than about 30% (FIG. 23). SMN polypeptide levels were evaluated 5 days following transfection with each the base editor system using an enzyme-linked immunosorbent assay (FIG. 22). Cells base edited using the base editor system CBE+gRNA1962 showed an increase in SMN polypeptide levels of about 70% relative to untreated cells, the base editor systems CBE+gRNA1962, ABE+gRNA1962, ABE+gRNA1973, and ABE+gRNA2349 were all associated with an increase in SMN polypeptide levels. Advantageously, the bases edited using the guide gRNA1962 fell outside of the coding region of SMN2.

TABLE 23
Details relating to base editor systems of FIG. 22. Each base
editor is named using the following convention: [Name of Type of Base
Editor]_[Deaminase Domain]_[nucleic acid programmable DNA
binding protein domain]_[PAM sequence], where “Sa” indicates
“Staplylococcus aureus,” “Sp” indicates “Streptococcus pyogenes,” and
“8.20” indicates “TadA*8.20.” See Tables 2B and 2C for guide sequences.

| | Name for | |
|---|---|---|
| | mRNA | |
| Type of Base Editor | encoding the | |
| Used and Guide Name | Base Editor | Base Editor |
| IBE16/gRNA2018 | mRNA3167 | IBE16_ABE_8.20_SpCas9_NGC |
| IBE12/gRNA2018 | mRNA3170 | IBE12_ABE_8.20_SpCas9_NGC |
| IBE11/gRNA2018 | mRNA2959 | IBE11_ABE_8.20_SpCas9_NGC |
| CBE/g1962 | mRNA2744 | CBE_ppAPOBEC1_SpCas9_NGA |
| ABE/g1962 | mRNA2928 | ABE_8.20_SpCas9_NGA |
| deadABE/g1962 | mRNA2971 | dead_ABE_dABE8.20_E59Q_SpCas9_NGA |
| ABE/g1973 | mRNA2926 | ABE_8.20_SpCas9_NGG |
| deadABE/g1973 | mRNA2970 | dead_ABE_dABE8.20_E59Q_SpCas9_NGG |
| ABE/g2439 | mRNA2866 | ABE_8.20_SpCas9_NRTH |
| deadABE/g2349 | mRNA2975 | dead_ABE_dABE8.20_E59Q_SpCas9_NRTH |

[0976] Experiments were undertaken to evaluate the impact of base editing on SMN2 polypeptide levels in GM00232 cells (FIGS. 28 and 28) and in GM03813 cells (FIGS. 29 and 30). The GM00232 cells were human fibroblast cells collected from a 7-month old while male child with muscular atrophy. The child had the following characteristics: progressive muscular atrophy; absent deep tendon reflexes; abnormal EMG; 2 copies of the SMN2 gene; and homozygous for deletion of exons 7 and 8 of the SMN1 gene. The GM03813 cells were also homozygous for deletions of exons 7 and 8 of the SMN1 gene but contained 3 copies of the SMN2 gene. The GM00232 cells were base edited using the following base editor systems: CBE (encoded by mRNA2744)+gRNA1962; ABE (encoded by mRNA2892)+gRNA1992; CBE (encoded by mRNA2745)+gRNA1976; ABE (encoded by mRNA2926)+gRNA1974. The GM03813 cells were base edited using the following base editor systems; CBE (encoded by mRNA2745)+gRNA1976; ABE (encoded by mRNA2926)+gRNA1974; ABE (encoded by mRNA2892)+gRNA1992. Cells were transduced with mRNA encoding the base editor and the guide polynucleotide. All of the base editor systems achieved base editing efficiencies of greater than about 25% (FIGS. 27 and 29). SMN polypeptide levels were evaluated 5 days following transfection with each the base editor system using an enzyme-linked immunosorbent assay (FIGS. 28 and 30). The base editor systems CBE+gRNA1976, ABE+gRNA1974, ABE+gRNA1992 were all associated with an increase in SMN polypeptide levels ranging from about 15% to about 50% in the GM03813 cells. The base editor systems CBE (encoded by mRNA2744)+gRNA1962, ABE (encoded by mRNA2892)+gRNA1992, CBE (encoded by mRNA2745)+gRNA1976, and ABE (encoded by mRNA2926)+gRNA1974 were all associated with an increase in SMN polypeptide levels ranging from about 8% to about 85% in the GM00232 cells, and in the same rank order as measured for GM03813 cells.

[0977] The following methods were or are employed in Examples 1 and 2.

### Codon-Optimization

[0978] Polynucleotide sequences encoding components of the base editor systems were codon-optimized. It has been established that Cas9 codon usage and nuclear localization sequence can dramatically alter genome editing efficiencies in eukaryotes (see e.g., Kim, S. et al., Rescue of high-specificity Cas9 variants using sgRNAs with matched 5′ nucleotides. Genome Biol 18, 218, doi:10.1186/s13059-017-1355-3 (2017); Mikami, M. et al., Comparison of CRISPR/Cas9 expression constructs for efficient targeted mutagenesis in rice. Plant Mol Biol 88, 561-572, doi:10.1007/s11103-015-0342-x (2015); Jinek, M. et al., RNA-programmed genome editing in human cells. Elife 2, e00471, doi:10.7554/eLife.00471 (2013)). The original Cas9n component of base editors contains six potential polyadenylation sites, leading to poor expression in eukaryotes (see e.g., Kim, S. et al., Rescue of high-specificity Cas9 variants using sgRNAs with matched 5′ nucleotides. Genome Biol 18, 218, doi:10.1186/s13059-017-1355-3 (2017); Komor, A. C. et al., Programmable editing of a target base in genomic DNA without double-stranded DNA cleavage. Nature 533, 420-424, doi:10.1038/nature17946 (2016); Gaudelli, N. M. et al.

[0979] Programmable base editing of A*T to G*C in genomic DNA without DNA cleavage. Nature 551, 464-471, doi:10.1038/nature24644 (2017)). Replacing this with an extensively optimized codon sequence improved base editing efficiencies (see e.g., Cong, L. et al. Multiplex genome engineering using CRISPR/Cas systems. Science 339, 819-823, doi:10.1126/science.1231143 (2013); Koblan, L. W. et al. Improving cytidine and adenine base editors by expression optimization and ancestral reconstruction. Nat Biotechnol, doi:10.1038/nbt.4172 (2018); Zafra, M. P. et al. Optimized base editors enable efficient editing in cells, organoids and mice. Nat Biotechnol, doi:10.1038/nbt.4194 (2018)).

### Cloning

[0980] All cloning was conducted via USER enzyme (New England Biolabs) cloning methods (see Geu-Flores et al., USER fusion: a rapid and efficient method for simultaneous fusion and cloning of multiple PCR products. Nucleic Acids Res 35, e55, doi:10.1093/nar/gkm106 (2007)) and templates for PCR amplification were purchased as bacterial or mammalian codon optimized gene fragments (GeneArt). Vectors were transformed into Mach T1R Competent Cells (Thermo Fisher Scientific) and maintained at −80 C for long-term storage. All primers used in this work were purchased from Integrated DNA Technologies and PCRs were carried out using either Phusion U DNA Polymerase Green MultiPlex PCR Master Mix (ThermoFisher) or Q5 Hot Start High-Fidelity 2x Master Mix (New England Biolabs). All plasmids used in this work were freshly prepared from 50 mL of Machi culture using ZymoPURE Plasmid Midiprep (Zymo Research Corporation) which involves an endotoxin removal procedure. Molecular biology grade, Hyclone water (GE Healthcare Life Sciences) was used in all assays, transfections, and PCR reactions to ensure exclusion of DNAse activity.

### Mammalian Cell Culture Conditions

[0981] The HEK293T (293T) cell line is obtained from the American Tissue Culture Collection (ATCC). Cells are cultured at 37° C. with 5% CO₂. HEK293T cells [CLBTx013, American Type Cell Culture Collection (ATCC)] are cultured in Dulbecco's modified Eagles medium plus Glutamax (10566-016, Thermo Fisher Scientific) with 10% (v/v) fetal bovine serum (A31606-02, Thermo Fisher Scientific). Cells are tested for mycoplasma after receipt from the supplier.

Hek293T Transfection and Genomic DNA (gDNA) Extraction

[0982] HEK293T cells are seeded on 48-well collagen-coated BioCoat plates (Corning) and transfected at approximately 85% confluency. Briefly, HEK293T cells are seeded onto 48-well well Poly-D-Lysine treated BioCoat plates (Corning) at a density of 35,000 cells/well and transfected 18-24 hours after plating. Cells are counted using a NucleoCounter NC-200 (Chemometec). To these cells are added 750 ng of base editor or nuclease, 250 ng of sgRNA, and 10 ng of GFP-max plasmid (Lonza) diluted to 12.5 μL total volume in Opti-MEM reduced serum media (ThermoFisher Scientific). The solution is combined with 1.5 μL of Lipofectamine 2000 (ThermoFisher) in 11 μL of Opti-MEM reduced serum media and left to rest at room temperature for 15 min. The entire 25 μL mixture is then transferred to the pre-seeded Hek293T cells and left to incubate for about 120 h. Following incubation, media is aspirated and cells are washed two times with 250 μL of 1× PBS solution (ThermoFisher Scientific) and 100 μL of freshly prepared lysis buffer is added (100 mM Tris-HCl, pH 7.0, 0.05% SDS, 25 μg/mL Proteinase K (Thermo Fisher Scientific). Transfection plates containing lysis buffer are incubated at 37° C. for 1 hour and the mixture is transferred to a 96-well PCR plate and heated at 80° C. for 30 min.

### Analysis of DNA and RNA Off-Target Editing

[0983] HEK293T cells are plated on 48-well poly-D-lysine coated plates (Corning) 16 to 20 hours before lipofection at a density of 30,000 cells per well in DMEM+Glutamax medium (Thermo Fisher Scientific) without antibiotics. 750 ng nickase, nuclease, or base editor expression plasmid DNA is combined with 250 ng of sgRNA expression plasmid DNA in 15 μl OPTIMEM+Glutamax. This is combined with 10 μl of lipid mixture, comprising 1.5 μl Lipofectamine 2000 and 8.5 μl OPTIMEM+Glutamax per well. Cells are harvested 3 days after transfection and either DNA or RNA is harvested. For DNA analysis, cells are washed once in 1×PBS, and then lysed in 100 μl QuickExtract™ Buffer (Lucigen) according to the manufacturer's instructions. For RNA harvest, the MagMAX™ mirVana™ Total RNA Isolation Kit (Thermo Fisher Scientific) is used with the KingFisher™ Flex Purification System according to the manufacturer's instructions.

[0984] Targeted RNA sequencing is performed largely as previously described (see Rees, H. A. et al., Analysis and minimization of cellular RNA editing by DNA adenine base editors. Sci Adv 5, eaax5717, doi:10.1126/sciadv.aax5717 (2019)). cDNA is prepared from the isolated RNA using the SuperScript IV One-Step RT-PCR System with EZDnase (Thermo Fisher Scientific) according to the manufacturer's instructions. The following program is used: 58° C. for 12 min; 98° C. for 2 min; followed by PCR cycles which varied by amplicon. No RT controls are run concurrently with the samples. Following the combined RT-PCR, amplicons are barcoded and sequenced using an Illumina Miseq. The first 125nt in each amplicon, beginning at the first base after the end of the forward primer in each amplicon, is aligned to a reference sequence and used for analysis of mean and maximum base editing frequencies in each amplicon.

[0985] Off-target DNA sequencing is performed using previously published primers (see Komor, A. C. et al., Programmable editing of a target base in genomic DNA without double-stranded DNA cleavage. Nature 533, 420-424, doi:10.1038/nature17946 (2016); Rees, H. A. et al., Analysis and minimization of cellular RNA editing by DNA adenine base editors. Sci Adv 5, eaax5717, doi:10.1126/sciadv.aax5717 (2019)) using a two-step PCR and barcoding method to prepare samples for sequencing using Illumina Miseq sequencers.

[0986] Deep sequencing is performed on PCR amplicons from genomic DNA or RNA harvested from duplicate transfections of 293T cells. After validating the quality of PCR product by gel electrophoresis, the PCR products are isolated by gel extraction, e.g., using the Zymoclean Gel DNA Recovery Kit (Zymo Research). Shotgun libraries are prepared without shearing. The library is quantified by qPCR and sequenced on one MiSeq Nano flowcell for 251 cycles from each end of the fragments using a MiSeq 500-cycle sequencing kit version 2. Fastq files are generated and demultiplexed with the bcl2fastq v2.17.1.14 Conversion Software (Illumina).

mRNA Production

[0987] Editors/nucleases are cloned into a plasmid encoding a dT7 promoter followed by a 5′UTR, Kozak sequence, ORF, and 3′UTR. The dT7 promoter carries an inactivating point mutation within the T7 promoter that prevents transcription from circular plasmid. This plasmid templates a PCR reaction (Q5 Hot Start 2X Master Mix), in which the forward primer corrects the SNP within the T7 promoter and the reverse primer appends a 120A tail to the 3′ UTR. The resulting PCR product is purified on a Zymo Research 25 μg DCC column and used as mRNA template in the subsequent in vitro transcription. The NEB HiScribe High-Yield Kit is used as per the instruction manual but with full substitution of N1-methyl-pseudouridine for uridine and co-transcriptional capping with CleanCap AG (Trilink). Reaction cleanup is performed by lithium chloride precipitation.

In Vitro Transcription of sgRNAs.

[0988] Linear DNA fragments containing the CMV promoter followed by the sgRNA target sequence are transcribed in vitro using the TranscriptAid T7 High Yield Transcription Kit (ThermoFisher Scientific) according to the manufacturer's instructions. sgRNA products are purified using the MEGAclear Kit (ThermoFisher Scientific) according to the manufacturer's instructions and quantified by UV absorbance.

### High-Throughput DNA Sequencing

[0989] Samples are sequenced on an Illumina MiSeq as previously described (Pattanayak, Nature Biotechnol. 31, 839-843 (2013)).

### Data Analysis

[0990] Sequencing reads are automatically demultiplexed using MiSeq Reporter (Illumina), and individual FASTQ files are analyzed with a custom Matlab. Each read is pairwise aligned to the appropriate reference sequence using the Smith-Waterman algorithm. Base calls with a Q-score below 31 are replaced with Ns and are thus excluded in calculating nucleotide frequencies. This treatment yields an expected MiSeq base-calling error rate of approximately 1 in 1,000. Aligned sequences in which the read and reference sequence contain no gaps are stored in an alignment table from which base frequencies can be tabulated for each locus. Indel frequencies are quantified with a custom Matlab script using previously described criteria (Zuris, et al., Nature Biotechnol. 33, 73-80 (2015). Sequencing reads are scanned for exact matches to two 10-bp sequences that flank both sides of a window in which indels might occur. If no exact matches are located, the read is excluded from analysis. If the length of this indel window exactly matched the reference sequence, the read is classified as not containing an indel. If the indel window was two or more bases longer or shorter than the reference sequence, then the sequencing read is classified as an insertion or deletion, respectively.

[0991] The following materials and methods were employed in Examples 3 and 4.

### Evaluation of Base Editor Systems

### GM03813 Cells

[0992] Two 48 well plates of SMA patient fibroblast cells (GM03813, GM00232, or GM09677 cells) were plated such that they would be ˜80% confluent the next day for transfection (˜11,000 cells per plate for GM00232 and GM09677).

[0993] Once ˜80% confluent, the two plates were identically transfected with 300 ng or 60 ng of the respective editor mRNA and 100 ng or 30 ng of the respective gRNA, respectively, using 1 uL of Lipofectamine MessengerMAX (LMRNA001), otherwise following the manufacturer's protocol. It was found that transfection with 60 ng of the mRNA and 30 ng of the gRNA resulted in comparatively high cell density post-transfection and good base editing efficiencies. All treatments were done in triplicate. Mock transfection controls underwent the same protocol as other samples, but no RNA was ever added. Editor/guide combinations were chosen to maximize base editing efficiencies. Base editor controls included an adenosine deaminase used in combination with the guide sgRNA88 and a cytidine deaminase used in combination with the guide sgRNA88. As a positive control, unedited cells were contacted with 100 nM or 30 nM of the antisense oligonucleotide (ASO) nusinersen. The editor/guide combinations evaluated in GM00232 and GM09577 cells were chosen due to their ability to make edits that increase Exon 7 inclusion on an RNA level and increase SMN protein in GM03813s. In some cases, active base editors were tested alongside dead base editor variants with low-to-no base editing activity.

[0994] The cells were processed 5 days post-transfection. One plate was processed using a Cells-to-CT™ 1-Step TaqMan™ Kit (A25603) and lysed using 75 uL of the included lysis buffer to cover the bottom of each well, otherwise following the manufacturer's protocol. For all lysates qRT-PCR was used to measure total levels of spliced SMN2 and/or SMN1 transcripts as described below.

[0995] The other plate was processed using QuickExtract DNA Extraction Solution (QE09050) for next-generation sequencing (NGS) submission using the manufacturer's protocol.

### Enzyme-Linked Immunosorbent Assay

[0996] One 24 well plate was seeded with about 13,000 or 15,000 GM03813 or GM00232 patient fibroblasts per well so that the following day, each well would be ˜85% confluent and ready for transfection. Alternatively, two 24 well plates were seeded with 35,000 GM03813 patient fibroblasts per well so that about 3 hours later the same day, each well would be ˜85% confluent and the cells would settle and be ready for transfection, where one plate was used for ELISA analysis and the other for NGS processing.

[0997] Once adequately confluent, the plate was transfected with 1 nM, 3 nM, 10 nM, 30 nM, or 100 nM of the antisense oligonucleotide (ASO) nusinersen or transfected with 104 ng of mRNA encoding a base editor and 52 ng of a guide polynucleotide (e.g., gRNA1962, gRNA1973, gRNA1974, gRNA1976, gRNA1992, gRNA2349, gRNA1977). The transfections were completed using 1.5 uL of Lipofectamine MessengerMAX (LMRNA001), otherwise following the manufacturer's protocol. The amount of editor mRNA and gRNA was chosen because it showed a combination of good cell density post-transfection and good editing efficiencies. The dose was scaled up from 60 ng editor mRNA:30 ng gRNA in a 48 well plate. The mock transfection control underwent the same protocol as the others, but no RNA was ever added. All treatments were done in triplicate.

[0998] The plate was lysed according to the ELISA kit's protocol and collected on day 5. Each well was pelleted, washed with PBS, pelleted again, and then lysed in 100 uL of complete cell lysis buffer. No significant cell death was seen at any point after transfection. The SMN ELISA was performed using the Enzo kit (ADI-900-209) and its respective protocol. Cells were lysed in 500 uL of complete lysis buffer. ELISA results were normalized to total protein amount using the Pierce™ Rapid Gold BCA Protein Assay Kit (A53227) and its respective protocol.

Quantitative Reverse Transcriptase Polymerase Chain Reaction (qRT-PCR)

[0999] Two 48 well plates of GM03813 cells were plated such that they would be ˜80% confluent the next day for transfection. 11,000 cells per well were plated to achieve this end.

[1000] Once ˜80% confluent, the two plates were transfected with mRNA encoding a base editor and a guide polynucleotide (gRNA) using 1 uL of Lipofectamine MessengerMAX (LMRNA001), otherwise following the manufacturer's protocol. All treatments were done in triplicate. A mock transfection control underwent the same protocol as the others, but no RNA was ever added. Various guides/editor combinations and transfection and treatment controls were included in the transfection.

[1001] The cells were processed 5 days post-transfection. One plate was processed using a Cells-to-CT™ 1-Step TaqMan™ Kit (A25603) and lysed using 75 uL of the included lysis buffer to cover the bottom of each well, otherwise following the manufacturer's protocol. The following were measured for all lysates: total levels of spliced SMN2 and/or SMN1 transcripts (ThermoFisher kit Hs00165806_m1) and levels of transcripts including or excluding Exon 7. Levels of TBP transcripts were measured for normalizing SMN2 and/or SMN1 transcript levels. The following off-the shelf assays were used: Hs00165806_m1 from ThermoFisher (for measuring total SMN transcript levels); Hs00427620_m1 from ThermoFisher (for measuring TBP transcript levels).

[1002] The following primers were used: 5′-CACATTCCAGATCTGTCTGATCG-3′ (SEQ ID NO: 620; 1R); 5′-CACCACCTCCCATATGTCCAG-3′ (SEQ ID NO: 621; 1F); 5′-TACTGGCTATTATATGGGTTTTAG-3′ (SEQ ID NO: 622; 2F). The following probe was used for detecting spliced SMN1 and/or SMN2 transcripts lacking Exon 7: 5′-/SHEX/ACTGGCTAT/ZEN/TATATGGAAATGCTGGCA/31ABkFQ/-3′ (SEQ ID NO: 623), where “SHEX” and “31ABkFQ” represent fluorescent dyes and “ZEN” represents an internal quencher. The following probe was used for detecting spliced SMN1 and/or SMN2 transcripts that included Exon 7: 5′-/56-FAM/AAGAAGGAA/ZEN/GGTGCTCACATTCCT/31ABkFQ/-3′ (SEQ ID NO: 624), where “56-FAM” and “31ABkFQ” represent fluorescent dyes and “ZEN” represents an internal quencher.

[1003] qRT-PCR was conducted according to the Cells-to-CT kit's protocol. 2 uL of lysate was used in each 20 uL reaction in a 96 well qPCR plate. The 60° C. step during amplification was shortened from 1 min to 20s. The no reverse transcriptase (-RT) control was prepared by heating the Cells-to-CT qPCR mix at 90° C. for 10 minutes. Duplicates of each treatment triplicate were analyzed. Spliced SMN1 and/or SMN2 transcript Ct results were normalized to TBP Ct results.

### Other Embodiments

[1004] From the foregoing description, it will be apparent that variations and modifications may be made to the invention described herein to adopt it to various usages and conditions. Such embodiments are also within the scope of the following claims.

[1005] The recitation of a listing of elements in any definition of a variable herein includes definitions of that variable as any single element or combination (or subcombination) of listed elements. The recitation of an embodiment herein includes that embodiment as any single embodiment or in combination with any other embodiments or portions thereof.

[1006] All patents and publications mentioned in this specification are herein incorporated by reference to the same extent as if each independent patent and publication was specifically and individually indicated to be incorporated by reference.

What is claimed:

1. A method of editing a nucleobase of a survival of motor neuron 2 (SMN2) polynucleotide, the method comprising contacting the SMN2 polynucleotide with a guide polynucleotide and a base editor comprising a fusion protein or a protein complex comprising a nucleic acid programmable DNA binding protein (napDNAbp) domain and a deaminase domain, wherein said guide polynucleotide targets said base editor to effect an alteration of the nucleobase of the SMN2 polynucleotide.

2. The method of claim 1, wherein the SMN2 polynucleotide is in a motor neuron or fibroblast, and wherein the cell is in vivo or in vitro.

3. A method of treating spinal muscular atrophy (SMA) in a subject in need thereof, the method comprising contacting a cell of the subject with a base editor comprising a fusion protein or protein complex comprising a nucleic acid programmable DNA binding protein (napDNAbp) domain and a deaminase domain, or a polynucleotide encoding the base editor, and one, two, or more guide polynucleotide(s), or polynucleotide(s) encoding the guide polynucleotide(s), that target the base editor to effect an alteration of a survival of motor neuron 2 (SMN2) polynucleotide, thereby treating SMA in the subject.

4. The method of claim 1, wherein the guide polynucleotide(s) comprises a nucleic acid sequence comprising at least 10 contiguous nucleotides of a spacer nucleic acid sequence listed in Table 2A or Table 2C.

5. The method of claim 4, wherein the guide polynucleotide comprises the nucleotide sequence ACUCCUUAAUUUAAGGAAUG (SEQ ID NO: 562; gRNA1962); GACAAAAUCAAAAAGAAGGA (SEQ ID No: 514; gRNA1973); UUAAGGAGUAAGUCUGCCAG (SEQ ID NO: 626; gRNA2349); UGCUCACAUUCCUUAAAUUA (SEQ ID NO: 574; gRNA1974); GCAGACUUACUCCUUAAUUUA (SEQ ID NO: 576; gRNA1976); or UCACAUUCCUUAAAUUAAGGA (SEQ ID NO: 592; gRNA1992).

6. The method of any one of claim 1, wherein the guide polynucleotide comprises a scaffold comprising the nucleotide sequence:
SpCas9 scaffold
(SEQ ID NO: 317)
GUUUUAGAGCUAGAAAUAGCAAGUUAAAAUAAGGCUAGUCCGUUAUCAA
CUUGAAAAAGUGGCACCGAGUCGGUGCUUUU;
or
SaCas9 scaffold
(SEQ ID NO: 425)
GUUUUAGUACUCUGUAAUGAAAAUUACAGAAUCUACUAAAACAAGGCAA
AAUGCCGUGUUUAUCUCGUCAACUUGUUGGCGAGAUUUU.

7. The method of claim 1, wherein the guide polynucleotide comprises the sequence
(SEQ ID NO: 503; gRNA1962)
ACUCCUUAAUUUAAGGAAUGGUUUUAGAGCUAGAAAUAGCAAGUUAAAA
UAAGGCUAGUCCGUUAUCAACUUGAAAAAGUGGCACCGAGUCGGUGCUU
UU;
(SEQ ID NO: 514; gRNA1973)
GACAAAAUCAAAAAGAAGGAGUUUUAGAGCUAGAAAUAGCAAGUUAAAA
UAAGGCUAGUCCGUUAUCAACUUGAAAAAGUGGCACCGAGUCGGUGCUU
UU;
(SEQ ID NO: 630; gRNA2349)
UUAAGGAGUAAGUCUGCCAGGUUUUAGAGCUAGAAAUAGCAAGUUAAAA
UAAGGCUAGUCCGUUAUCAACUUGAAAAAGUGGCACCGAGUCGGUGCUU
UU;
(SEQ ID NO: 515; gRNA1974)
UGCUCACAUUCCUUAAAUUAGUUUUAGAGCUAGAAAUAGCAAGUUAAAA
UAAGGCUAGUCCGUUAUCAACUUGAAAAAGUGGCACCGAGUCGGUGCUU
UU;
(SEQ ID NO: 517; gRNA1976)
GCAGACUUACUCCUUAAUUUAGUUUUAGUACUCUGUAAUGAAAAUUACA
GAAUCUACUAAAACAAGGCAAAAUGCCGUGUUUAUCUCGUCAACUUGUU
GGCGAGAUUUU;
or
(SEQ ID NO: 533; gRNA1992)
UCACAUUCCUUAAAUUAAGGAGUUUUAGUACUCUGUAAUGAAAAUUACA
GAAUCUACUAAAACAAGGCAAAAUGCCGUGUUUAUCUCGUCAACUUGUU
GGCGAGAUUUU.

8. The method of claim 1, wherein alteration of the nucleobase is associated with an increase in full-length polynucleotides encoding the SMN2 polypeptide transcribed from the SMN2 polynucleotide; and/or wherein alteration of a nucleobase in the SMN2 polynucleotide results in an increase in the number of transcripts transcribed from the SMN2 polynucleotide that include Exon 7.

9. The method of claim 1, wherein the altered nucleobase in the SMN2 polynucleotide is associated with an alteration in splicing; and/or wherein the alteration is associated with an increase in levels of a survival motor neuron (SMN) polypeptide in a cell.

10. The method of claim 1, wherein the alteration is selected from the group consisting of a C10 alteration in Intron 7 of the SMN2 polynucleotide, a C7 alteration in Intron 7 of the SMN2 polynucleotide, a C11 alteration in Intron 7 of the SMN2 polynucleotide, a T6C alteration in Exon 7 of the SMN2 polynucleotide, and a A54G alteration in Exon 7 of the SMN2 polynucleotide.

11. The method of claim 1, wherein the napDNAbp domain comprises a Cas9, Cas12a/Cpf1, Cas12b/C2c1, Cas12c/C2c3, Cas12d/CasY, Cas12e/CasX, Cas12g, Cas12h, Cas12i, or Cas12j/CasΦ polynucleotide or a portion thereof,
wherein the napDNAbp domain comprises a dead Cas9 (dCas9) or a Cas9 nickase (nCas9);
wherein the napDNAbp domain is a modified Staphylococcus aureus Cas9 (SaCas9), Streptococcus thermophilus 1 Cas9 (St1Cas9), a modified Streptococcus pyogenes Cas9 (SpCas9), or variants thereof,
wherein the napDNAbp domain comprises a variant of SpCas9 having an altered protospacer-adjacent motif (PAM) specificity;
wherein the cytidine deaminase domain is an APOBEC deaminase domain or a derivative thereof;
wherein the adenosine deaminase domain is TadA deaminase domain;
wherein the napDNAbp domain further comprises one or more uracil glycosylase inhibitors (UGIs); and/or
wherein the napDNAbp domain further comprises one or more nuclear localization sequences (NLS).

12. The method of claim 3, wherein contacting the cell involves administering a polynucleotide to the subject or a vector comprising the polynucleotide, wherein the polynucleotide encodes the base editor, or a component thereof, and/or the guide polynucleotide.

13. The method of claim 12, wherein the vector is a lipid nanoparticle.

14. The method of claim 13, wherein the vector is an AAV9 vector or an AAV-PHP.B vector.

15. A modified cell comprising an alteration in a nucleobase of a survival of motor neuron 2 (SMN2) polynucleotide, wherein the alteration increases expression and/or activity of the encoded SMN2 polypeptide as compared to a control cell without the alteration.

16. A base editor system comprising a fusion protein or a polynucleotide encoding the fusion protein, wherein the fusion protein comprises a nucleic acid programmable DNA binding protein (napDNAbp) domain, a deaminase domain, and a guide polynucleotide comprising a spacer sequence selected from Table 2A or Table 2C.

17. A polynucleotide encoding the base editor system of claim 16, or a component thereof.

18. A vector comprising the polynucleotide of claim 17.

19. A cell produced by the method of claim 3.

20. A kit comprising a base editor system comprising a fusion protein or a polynucleotide encoding the fusion protein, wherein the fusion protein comprises a nucleic acid programmable DNA binding protein (napDNAbp) domain, a deaminase domain, and a guide polynucleotide comprising a spacer selected from Table 2A or Table 2C.

21. A pharmaceutical composition comprising an effective amount of a base editor system comprising a fusion protein or a polynucleotide encoding the fusion protein, wherein the fusion protein comprises a nucleic acid programmable DNA binding protein (napDNAbp) domain, a deaminase domain, and a guide polynucleotide comprising a spacer selected from Table 2A or Table 2C.

22. A guide polynucleotide comprising a sequence listed in Tables 2A-2C.

The application's sequence listing, which the Patent Office published only in electronic form, follows.

SEQUENCE LISTING (660 sequences)

SEQ ID NO: 1 - protein, 167 aa, Escherichia coli
  REGION 1..167: note = misc_feature - TadA*7.10 (ecTadA) polypeptide sequence
MSEVEFSHEYWMRHALTLAKRARDEREVPVGAVLVLNNRVIGEGWNRAIGLHDPTAHAEIMALRQGGLVMQNYRLIDATLYVTFEPCVMCAGAMIHSRIGRVVFGVRNAKTGAAGSLMDVLHYPGMNHRVEITEGILADECAALLCYFFRMPRQVFNAQKKAQSSTD

SEQ ID NO: 2 - DNA, 4092 bp, synthetic construct
  misc_feature 1..4092: note = BhCas12b GGSGGS-ABE8-Xten20at P153 polynucleotide sequence
  misc_feature 1..6: note = Kozak sequence
  misc_feature 7..57: note = Sequence encoding N-terminal nuclear localization signal
  misc_feature 58..513: note = Sequence encoding BhCas12b
  misc_feature 514..531: note = Sequence encoding a linker
  misc_feature 532..1029: note = Sequence encoding TadA*8
  misc_feature 1030..1089: note = Sequence encoding Xten20 linker
  misc_feature 1090..3954: note = Sequence encoding BhCas12b
  misc_feature 3955..4002: note = Sequence encoding C-terminal NLS
  misc_feature 4003..4008: note = Sequence encoding GS linker
  misc_feature 4009..4089: note = Sequence encoding 3x hemagglutinin (HA) tag
  source 1..4092: mol_type = other DNA
gccaccatggccccaaagaagaagcggaaggtcggtatccacggagtcccagcagccgccaccagatccttcatcctgaagatcgagcccaacgaggaagtgaagaaaggcctctggaaaacccacgaggtgctgaaccacggaatcgcctactacatgaatatcctgaagctgatccggcaagaggccatctacgagcaccacgagcaggaccccaagaatcccaagaaggtgtccaaggccgagatccaggccgagctgtgggatttcgtgctgaagatgcagaagtgcaacagcttcacacacgaggtggacaaggacgaggtgttcaacatcctgagagagctgtacgaggaactggtgcccagcagcgtggaaaagaagggcgaagccaaccagctgagcaacaagtttctgtaccctctggtggaccccaacagccagtctggaaagggaacagccagcagcggcagaaagcccagatggtacaacctgaagattgccggcgatcccggaggctctggaggaagctccgaagtcgagttttcccatgagtactggatgagacacgcattgactctcgcaaagagggctcgagatgaacgcgaggtgcccgtgggggcagtactcgtgctcaacaatcgcgtaatcggcgaaggttggaatagggcaatcggactccacgaccccactgcacatgcggaaatcatggcccttcgacagggagggcttgtgatgcagaattatcgactttatgatgcgacgctgtacgtcacgtttgaaccttgcgtaatgtgcgcgggagctatgattcactcccgcattggacgagttgtattcggtgttcgcaacgccaagacgggtgccgcaggttcactgatggacgtgctgcatcatccaggcatgaaccaccgggtagaaatcacagaaggcatattggcggacgaatgtgcggcgctgttgtgtcgtttttttcgcatgcccaggcgggtctttaacgcccagaaaaaagcacaatcctctactgacggctcttctggatctgaaacacctggcacaagcgagagcgccacccctgagagctctggctcctgggaagaagagaagaagaagtgggaagaagataagaaaaaggacccgctggccaagatcctgggcaagctggctgagtacggactgatccctctgttcatcccctacaccgacagcaacgagcccatcgtgaaagaaatcaagtggatggaaaagtcccggaaccagagcgtgcggcggctggataaggacatgttcattcaggccctggaacggttcctgagctgggagagctggaacctgaaagtgaaagaggaatacgagaaggtcgagaaagagtacaagaccctggaagagaggatcaaagaggacatccaggctctgaaggctctggaacagtatgagaaagagcggcaagaacagctgctgcgggacaccctgaacaccaacgagtaccggctgagcaagagaggccttagaggctggcgggaaatcatccagaaatggctgaaaatggacgagaacgagccctccgagaagtacctggaagtgttcaaggactaccagcggaagcaccctagagaggccggcgattacagcgtgtacgagttcctgtccaagaaagagaaccacttcatctggcggaatcaccctgagtacccctacctgtacgccaccttctgcgagatcgacaagaaaaagaaggacgccaagcagcaggccaccttcacactggccgatcctatcaatcaccctctgtgggtccgattcgaggaaagaagcggcagcaacctgaacaagtacagaatcctgaccgagcagctgcacaccgagaagctgaagaaaaagctgacagtgcagctggaccggctgatctaccctacagaatctggcggctgggaagagaagggcaaagtggacattgtgctgctgcccagccggcagttctacaaccagatcttcctggacatcgaggaaaagggcaagcacgccttcacctacaaggatgagagcatcaagttccctctgaagggcacactcggcggagccagagtgcagttcgacagagatcacctgagaagataccctcacaaggtggaaagcggcaacgtgggcagaatctacttcaacatgaccgtgaacatcgagcctacagagtccccagtgtccaagtctctgaagatccaccgggacgacttccccaaggtggtcaacttcaagcccaaagaactgaccgagtggatcaaggacagcaagggcaagaaactgaagtccggcatcgagtccctggaaatcggcctgagagtgatgagcatcgacctgggacagagacaggccgctgccgcctctattttcgaggtggtggatcagaagcccgacatcgaaggcaagctgtttttcccaatcaagggcaccgagctgtatgccgtgcacagagccagcttcaacatcaagctgcccggcgagacactggtcaagagcagagaagtgctgcggaaggccagagaggacaatctgaaactgatgaaccagaagctcaacttcctgcggaacgtgctgcacttccagcagttcgaggacatcaccgagagagagaagcgggtcaccaagtggatcagcagacaagagaacagcgacgtgcccctggtgtaccaggatgagctgatccagatccgcgagctgatgtacaagccttacaaggactgggtcgccttcctgaagcagctccacaagagactggaagtcgagatcggcaaagaagtgaagcactggcggaagtccctgagcgacggaagaaagggcctgtacggcatctccctgaagaacatcgacgagatcgatcggacccggaagttcctgctgagatggtccctgaggcctaccgaacctggcgaagtgcgtagactggaacccggccagagattcgccatcgaccagctgaatcacctgaacgccctgaaagaagatcggctgaagaagatggccaacaccatcatcatgcacgccctgggctactgctacgacgtgcggaagaagaaatggcaggctaagaaccccgcctgccagatcatcctgttcgaggatctgagcaactacaacccctacgaggaaaggtcccgcttcgagaacagcaagctcatgaagtggtccagacgcgagatccccagacaggttgcactgcagggcgagatctatggcctgcaagtgggagaagtgggcgctcagttcagcagcagattccacgccaagacaggcagccctggcatcagatgtagcgtcgtgaccaaagagaagctgcaggacaatcggttcttcaagaatctgcagagagagggcagactgaccctggacaaaatcgccgtgctgaaagagggcgatctgtacccagacaaaggcggcgagaagttcatcagcctgagcaaggatcggaagtgcgtgaccacacacgccgacatcaacgccgctcagaacctgcagaagcggttctggacaagaacccacggcttctacaaggtgtactgcaaggcctaccaggtggacggccagaccgtgtacatccctgagagcaaggaccagaagcagaagatcatcgaagagttcggcgagggctacttcattctgaaggacggggtgtacgaatgggtcaacgccggcaagctgaaaatcaagaagggcagctccaagcagagcagcagcgagctggtggatagcgacatcctgaaagacagcttcgacctggcctccgagctgaaaggcgaaaagctgatgctgtacagggaccccagcggcaatgtgttccccagcgacaaatggatggccgctggcgtgttcttcggaaagctggaacgcatcctgatcagcaagctgaccaaccagtactccatcagcaccatcgaggacgacagcagcaagcagtctatgaaaaggccggcggccacgaaaaaggccggccaggcaaaaaagaaaaagggatcctacccatacgatgttccagattacgcttatccctacgacgtgcctgattatgcatacccatatgatgtccccgactatgcctaa

SEQ ID NO: 3 - protein, 1361 aa, synthetic construct
  REGION 1..1361: note = BhCas12b GGSGGS-ABE8-Xten20at P153 polypeptide sequence
MAPKKKRKVGIHGVPAAATRSFILKIEPNEEVKKGLWKTHEVLNHGIAYYMNILKLIRQEAIYEHHEQDPKNPKKVSKAEIQAELWDFVLKMQKCNSFTHEVDKDEVFNILRELYEELVPSSVEKKGEANQLSNKFLYPLVDPNSQSGKGTASSGRKPRWYNLKIAGDPGGSGGSSEVEFSHEYWMRHALTLAKRARDEREVPVGAVLVLNNRVIGEGWNRAIGLHDPTAHAEIMALRQGGLVMQNYRLYDATLYVTFEPCVMCAGAMIHSRIGRVVFGVRNAKTGAAGSLMDVLHHPGMNHRVEITEGILADECAALLCRFFRMPRRVFNAQKKAQSSTDGSSGSETPGTSESATPESSGSWEEEKKKWEEDKKKDPLAKILGKLAEYGLIPLFIPYTDSNEPIVKEIKWMEKSRNQSVRRLDKDMFIQALERFLSWESWNLKVKEEYEKVEKEYKTLEERIKEDIQALKALEQYEKERQEQLLRDTLNTNEYRLSKRGLRGWREIIQKWLKMDENEPSEKYLEVFKDYQRKHPREAGDYSVYEFLSKKENHFIWRNHPEYPYLYATFCEIDKKKKDAKQQATFTLADPINHPLWVRFEERSGSNLNKYRILTEQLHTEKLKKKLTVQLDRLIYPTESGGWEEKGKVDIVLLPSRQFYNQIFLDIEEKGKHAFTYKDESIKFPLKGTLGGARVQFDRDHLRRYPHKVESGNVGRIYFNMTVNIEPTESPVSKSLKIHRDDFPKVVNFKPKELTEWIKDSKGKKLKSGIESLEIGLRVMSIDLGQRQAAAASIFEVVDQKPDIEGKLFFPIKGTELYAVHRASFNIKLPGETLVKSREVLRKAREDNLKLMNQKLNFLRNVLHFQQFEDITEREKRVTKWISRQENSDVPLVYQDELIQIRELMYKPYKDWVAFLKQLHKRLEVEIGKEVKHWRKSLSDGRKGLYGISLKNIDEIDRTRKFLLRWSLRPTEPGEVRRLEPGQRFAIDQLNHLNALKEDRLKKMANTIIMHALGYCYDVRKKKWQAKNPACQIILFEDLSNYNPYEERSRFENSKLMKWSRREIPRQVALQGEIYGLQVGEVGAQFSSRFHAKTGSPGIRCSVVTKEKLQDNRFFKNLQREGRLTLDKIAVLKEGDLYPDKGGEKFISLSKDRKCVTTHADINAAQNLQKRFWTRTHGFYKVYCKAYQVDGQTVYIPESKDQKQKIIEEFGEGYFILKDGVYEWVNAGKLKIKKGSSKQSSSELVDSDILKDSFDLASELKGEKLMLYRDPSGNVFPSDKWMAAGVFFGKLERILISKLTNQYSISTIEDDSSKQSMKRPAATKKAGQAKKKKGSYPYDVPDYAYPYDVPDYAYPYDVPDYA

SEQ ID NO: 4 - DNA, 4092 bp, synthetic construct
  misc_feature 1..4092: note = BhCas12b GGSGGS-ABE8-Xten20at K255 polynucleotide sequence
  misc_feature 1..6: note = Kozak sequence
  misc_feature 7..57: note = Sequence encoding N-terminal nuclear localization signal (NLS)
  misc_feature 58..822: note = Sequence encoding BhCas12b
  misc_feature 823..840: note = Sequence encoding a linker
  misc_feature 841..1338: note = Sequence encoding TadA*8
  misc_feature 1339..1398: note = Sequence encoding Xten20 linker
  misc_feature 1399..3954: note = Sequence encoding BhCas12b
  misc_feature 3955..4002: note = Sequence encoding C-terminal NLS
  misc_feature 4003..4008: note = Sequence encoding a GS linker
  misc_feature 4009..4089: note = Sequence encoding 3x hemagglutinin (HA) tag
  source 1..4092: mol_type = other DNA
gccaccatggccccaaagaagaagcggaaggtcggtatccacggagtcccagcagccgccaccagatccttcatcctgaagatcgagcccaacgaggaagtgaagaaaggcctctggaaaacccacgaggtgctgaaccacggaatcgcctactacatgaatatcctgaagctgatccggcaagaggccatctacgagcaccacgagcaggaccccaagaatcccaagaaggtgtccaaggccgagatccaggccgagctgtgggatttcgtgctgaagatgcagaagtgcaacagcttcacacacgaggtggacaaggacgaggtgttcaacatcctgagagagctgtacgaggaactggtgcccagcagcgtggaaaagaagggcgaagccaaccagctgagcaacaagtttctgtaccctctggtggaccccaacagccagtctggaaagggaacagccagcagcggcagaaagcccagatggtacaacctgaagattgccggcgatccctcctgggaagaagagaagaagaagtgggaagaagataagaaaaaggacccgctggccaagatcctgggcaagctggctgagtacggactgatccctctgttcatcccctacaccgacagcaacgagcccatcgtgaaagaaatcaagtggatggaaaagtcccggaaccagagcgtgcggcggctggataaggacatgttcattcaggccctggaacggttcctgagctgggagagctggaacctgaaagtgaaagaggaatacgagaaggtcgagaaagagtacaagaccctggaagagaggatcaaaggaggctctggaggaagctccgaagtcgagttttcccatgagtactggatgagacacgcattgactctcgcaaagagggctcgagatgaacgcgaggtgcccgtgggggcagtactcgtgctcaacaatcgcgtaatcggcgaaggttggaatagggcaatcggactccacgaccccactgcacatgcggaaatcatggcccttcgacagggagggcttgtgatgcagaattatcgactttatgatgcgacgctgtacgtcacgtttgaaccttgcgtaatgtgcgcgggagctatgattcactcccgcattggacgagttgtattcggtgttcgcaacgccaagacgggtgccgcaggttcactgatggacgtgctgcatcatccaggcatgaaccaccgggtagaaatcacagaaggcatattggcggacgaatgtgcggcgctgttgtgtcgtttttttcgcatgcccaggcgggtctttaacgcccagaaaaaagcacaatcctctactgacggctcttctggatctgaaacacctggcacaagcgagagcgccacccctgagagctctggcgaggacatccaggctctgaaggctctggaacagtatgagaaagagcggcaagaacagctgctgcgggacaccctgaacaccaacgagtaccggctgagcaagagaggccttagaggctggcgggaaatcatccagaaatggctgaaaatggacgagaacgagccctccgagaagtacctggaagtgttcaaggactaccagcggaagcaccctagagaggccggcgattacagcgtgtacgagttcctgtccaagaaagagaaccacttcatctggcggaatcaccctgagtacccctacctgtacgccaccttctgcgagatcgacaagaaaaagaaggacgccaagcagcaggccaccttcacactggccgatcctatcaatcaccctctgtgggtccgattcgaggaaagaagcggcagcaacctgaacaagtacagaatcctgaccgagcagctgcacaccgagaagctgaagaaaaagctgacagtgcagctggaccggctgatctaccctacagaatctggcggctgggaagagaagggcaaagtggacattgtgctgctgcccagccggcagttctacaaccagatcttcctggacatcgaggaaaagggcaagcacgccttcacctacaaggatgagagcatcaagttccctctgaagggcacactcggcggagccagagtgcagttcgacagagatcacctgagaagataccctcacaaggtggaaagcggcaacgtgggcagaatctacttcaacatgaccgtgaacatcgagcctacagagtccccagtgtccaagtctctgaagatccaccgggacgacttccccaaggtggtcaacttcaagcccaaagaactgaccgagtggatcaaggacagcaagggcaagaaactgaagtccggcatcgagtccctggaaatcggcctgagagtgatgagcatcgacctgggacagagacaggccgctgccgcctctattttcgaggtggtggatcagaagcccgacatcgaaggcaagctgtttttcccaatcaagggcaccgagctgtatgccgtgcacagagccagcttcaacatcaagctgcccggcgagacactggtcaagagcagagaagtgctgcggaaggccagagaggacaatctgaaactgatgaaccagaagctcaacttcctgcggaacgtgctgcacttccagcagttcgaggacatcaccgagagagagaagcgggtcaccaagtggatcagcagacaagagaacagcgacgtgcccctggtgtaccaggatgagctgatccagatccgcgagctgatgtacaagccttacaaggactgggtcgccttcctgaagcagctccacaagagactggaagtcgagatcggcaaagaagtgaagcactggcggaagtccctgagcgacggaagaaagggcctgtacggcatctccctgaagaacatcgacgagatcgatcggacccggaagttcctgctgagatggtccctgaggcctaccgaacctggcgaagtgcgtagactggaacccggccagagattcgccatcgaccagctgaatcacctgaacgccctgaaagaagatcggctgaagaagatggccaacaccatcatcatgcacgccctgggctactgctacgacgtgcggaagaagaaatggcaggctaagaaccccgcctgccagatcatcctgttcgaggatctgagcaactacaacccctacgaggaaaggtcccgcttcgagaacagcaagctcatgaagtggtccagacgcgagatccccagacaggttgcactgcagggcgagatctatggcctgcaagtgggagaagtgggcgctcagttcagcagcagattccacgccaagacaggcagccctggcatcagatgtagcgtcgtgaccaaagagaagctgcaggacaatcggttcttcaagaatctgcagagagagggcagactgaccctggacaaaatcgccgtgctgaaagagggcgatctgtacccagacaaaggcggcgagaagttcatcagcctgagcaaggatcggaagtgcgtgaccacacacgccgacatcaacgccgctcagaacctgcagaagcggttctggacaagaacccacggcttctacaaggtgtactgcaaggcctaccaggtggacggccagaccgtgtacatccctgagagcaaggaccagaagcagaagatcatcgaagagttcggcgagggctacttcattctgaaggacggggtgtacgaatgggtcaacgccggcaagctgaaaatcaagaagggcagctccaagcagagcagcagcgagctggtggatagcgacatcctgaaagacagcttcgacctggcctccgagctgaaaggcgaaaagctgatgctgtacagggaccccagcggcaatgtgttccccagcgacaaatggatggccgctggcgtgttcttcggaaagctggaacgcatcctgatcagcaagctgaccaaccagtactccatcagcaccatcgaggacgacagcagcaagcagtctatgaaaaggccggcggccacgaaaaaggccggccaggcaaaaaagaaaaagggatcctacccatacgatgttccagattacgcttatccctacgacgtgcctgattatgcatacccatatgatgtccccgactatgcctaa

SEQ ID NO: 5 - protein, 1361 aa, synthetic construct
  REGION 1..1361: note = BhCas12b GGSGGS-ABE8-Xten20at K255 polypeptide sequence
MAPKKKRKVGIHGVPAAATRSFILKIEPNEEVKKGLWKTHEVLNHGIAYYMNILKLIRQEAIYEHHEQDPKNPKKVSKAEIQAELWDFVLKMQKCNSFTHEVDKDEVFNILRELYEELVPSSVEKKGEANQLSNKFLYPLVDPNSQSGKGTASSGRKPRWYNLKIAGDPSWEEEKKKWEEDKKKDPLAKILGKLAEYGLIPLFIPYTDSNEPIVKEIKWMEKSRNQSVRRLDKDMFIQALERFLSWESWNLKVKEEYEKVEKEYKTLEERIKGGSGGSSEVEFSHEYWMRHALTLAKRARDEREVPVGAVLVLNNRVIGEGWNRAIGLHDPTAHAEIMALRQGGLVMQNYRLYDATLYVTFEPCVMCAGAMIHSRIGRVVFGVRNAKTGAAGSLMDVLHHPGMNHRVEITEGILADECAALLCRFFRMPRRVFNAQKKAQSSTDGSSGSETPGTSESATPESSGEDIQALKALEQYEKERQEQLLRDTLNTNEYRLSKRGLRGWREIIQKWLKMDENEPSEKYLEVFKDYQRKHPREAGDYSVYEFLSKKENHFIWRNHPEYPYLYATFCEIDKKKKDAKQQATFTLADPINHPLWVRFEERSGSNLNKYRILTEQLHTEKLKKKLTVQLDRLIYPTESGGWEEKGKVDIVLLPSRQFYNQIFLDIEEKGKHAFTYKDESIKFPLKGTLGGARVQFDRDHLRRYPHKVESGNVGRIYFNMTVNIEPTESPVSKSLKIHRDDFPKVVNFKPKELTEWIKDSKGKKLKSGIESLEIGLRVMSIDLGQRQAAAASIFEVVDQKPDIEGKLFFPIKGTELYAVHRASFNIKLPGETLVKSREVLRKAREDNLKLMNQKLNFLRNVLHFQQFEDITEREKRVTKWISRQENSDVPLVYQDELIQIRELMYKPYKDWVAFLKQLHKRLEVEIGKEVKHWRKSLSDGRKGLYGISLKNIDEIDRTRKFLLRWSLRPTEPGEVRRLEPGQRFAIDQLNHLNALKEDRLKKMANTIIMHALGYCYDVRKKKWQAKNPACQIILFEDLSNYNPYEERSRFENSKLMKWSRREIPRQVALQGEIYGLQVGEVGAQFSSRFHAKTGSPGIRCSVVTKEKLQDNRFFKNLQREGRLTLDKIAVLKEGDLYPDKGGEKFISLSKDRKCVTTHADINAAQNLQKRFWTRTHGFYKVYCKAYQVDGQTVYIPESKDQKQKIIEEFGEGYFILKDGVYEWVNAGKLKIKKGSSKQSSSELVDSDILKDSFDLASELKGEKLMLYRDPSGNVFPSDKWMAAGVFFGKLERILISKLTNQYSISTIEDDSSKQSMKRPAATKKAGQAKKKKGSYPYDVPDYAYPYDVPDYAYPYDVPDYA

SEQ ID NO: 6 - DNA, 4092 bp, synthetic construct
  misc_feature 1..4092: note = BhCas12b GGSGGS-ABE8-Xten20at D306 polynucleotide sequence
  misc_feature 1..6: note = Kozak sequence
  misc_feature 7..57: note = Sequence encoding N-terminal nuclear localization signal (NLS)
  misc_feature 58..975: note = Sequence encoding BhCas12b
  misc_feature 976..993: note = Sequence encoding a linker
  misc_feature 994..1491: note = Sequence encoding TadA*8
  misc_feature 1492..1551: note = Sequence encoding Xten20 linker
  misc_feature 1552..3954: note = Sequence encoding BhCas12b
  misc_feature 3955..4002: note = Sequence encoding C-terminal NLS
  misc_feature 4003..4008: note = Sequence encoding a GS linker
  misc_feature 4009..4089: note = Sequence encoding 3x hemagglutinin (HA) tag
  source 1..4092: mol_type = other DNA
gccaccatggccccaaagaagaagcggaaggtcggtatccacggagtcccagcagccgccaccagatccttcatcctgaagatcgagcccaacgaggaagtgaagaaaggcctctggaaaacccacgaggtgctgaaccacggaatcgcctactacatgaatatcctgaagctgatccggcaagaggccatctacgagcaccacgagcaggaccccaagaatcccaagaaggtgtccaaggccgagatccaggccgagctgtgggatttcgtgctgaagatgcagaagtgcaacagcttcacacacgaggtggacaaggacgaggtgttcaacatcctgagagagctgtacgaggaactggtgcccagcagcgtggaaaagaagggcgaagccaaccagctgagcaacaagtttctgtaccctctggtggaccccaacagccagtctggaaagggaacagccagcagcggcagaaagcccagatggtacaacctgaagattgccggcgatccctcctgggaagaagagaagaagaagtgggaagaagataagaaaaaggacccgctggccaagatcctgggcaagctggctgagtacggactgatccctctgttcatcccctacaccgacagcaacgagcccatcgtgaaagaaatcaagtggatggaaaagtcccggaaccagagcgtgcggcggctggataaggacatgttcattcaggccctggaacggttcctgagctgggagagctggaacctgaaagtgaaagaggaatacgagaaggtcgagaaagagtacaagaccctggaagagaggatcaaagaggacatccaggctctgaaggctctggaacagtatgagaaagagcggcaagaacagctgctgcgggacaccctgaacaccaacgagtaccggctgagcaagagaggccttagaggctggcgggaaatcatccagaaatggctgaaaatggacggaggctctggaggaagctccgaagtcgagttttcccatgagtactggatgagacacgcattgactctcgcaaagagggctcgagatgaacgcgaggtgcccgtgggggcagtactcgtgctcaacaatcgcgtaatcggcgaaggttggaatagggcaatcggactccacgaccccactgcacatgcggaaatcatggcccttcgacagggagggcttgtgatgcagaattatcgactttatgatgcgacgctgtacgtcacgtttgaaccttgcgtaatgtgcgcgggagctatgattcactcccgcattggacgagttgtattcggtgttcgcaacgccaagacgggtgccgcaggttcactgatggacgtgctgcatcatccaggcatgaaccaccgggtagaaatcacagaaggcatattggcggacgaatgtgcggcgctgttgtgtcgtttttttcgcatgcccaggcgggtctttaacgcccagaaaaaagcacaatcctctactgacggctcttctggatctgaaacacctggcacaagcgagagcgccacccctgagagctctggcgagaacgagccctccgagaagtacctggaagtgttcaaggactaccagcggaagcaccctagagaggccggcgattacagcgtgtacgagttcctgtccaagaaagagaaccacttcatctggcggaatcaccctgagtacccctacctgtacgccaccttctgcgagatcgacaagaaaaagaaggacgccaagcagcaggccaccttcacactggccgatcctatcaatcaccctctgtgggtccgattcgaggaaagaagcggcagcaacctgaacaagtacagaatcctgaccgagcagctgcacaccgagaagctgaagaaaaagctgacagtgcagctggaccggctgatctaccctacagaatctggcggctgggaagagaagggcaaagtggacattgtgctgctgcccagccggcagttctacaaccagatcttcctggacatcgaggaaaagggcaagcacgccttcacctacaaggatgagagcatcaagttccctctgaagggcacactcggcggagccagagtgcagttcgacagagatcacctgagaagataccctcacaaggtggaaagcggcaacgtgggcagaatctacttcaacatgaccgtgaacatcgagcctacagagtccccagtgtccaagtctctgaagatccaccgggacgacttccccaaggtggtcaacttcaagcccaaagaactgaccgagtggatcaaggacagcaagggcaagaaactgaagtccggcatcgagtccctggaaatcggcctgagagtgatgagcatcgacctgggacagagacaggccgctgccgcctctattttcgaggtggtggatcagaagcccgacatcgaaggcaagctgtttttcccaatcaagggcaccgagctgtatgccgtgcacagagccagcttcaacatcaagctgcccggcgagacactggtcaagagcagagaagtgctgcggaaggccagagaggacaatctgaaactgatgaaccagaagctcaacttcctgcggaacgtgctgcacttccagcagttcgaggacatcaccgagagagagaagcgggtcaccaagtggatcagcagacaagagaacagcgacgtgcccctggtgtaccaggatgagctgatccagatccgcgagctgatgtacaagccttacaaggactgggtcgccttcctgaagcagctccacaagagactggaagtcgagatcggcaaagaagtgaagcactggcggaagtccctgagcgacggaagaaagggcctgtacggcatctccctgaagaacatcgacgagatcgatcggacccggaagttcctgctgagatggtccctgaggcctaccgaacctggcgaagtgcgtagactggaacccggccagagattcgccatcgaccagctgaatcacctgaacgccctgaaagaagatcggctgaagaagatggccaacaccatcatcatgcacgccctgggctactgctacgacgtgcggaagaagaaatggcaggctaagaaccccgcctgccagatcatcctgttcgaggatctgagcaactacaacccctacgaggaaaggtcccgcttcgagaacagcaagctcatgaagtggtccagacgcgagatccccagacaggttgcactgcagggcgagatctatggcctgcaagtgggagaagtgggcgctcagttcagcagcagattccacgccaagacaggcagccctggcatcagatgtagcgtcgtgaccaaagagaagctgcaggacaatcggttcttcaagaatctgcagagagagggcagactgaccctggacaaaatcgccgtgctgaaagagggcgatctgtacccagacaaaggcggcgagaagttcatcagcctgagcaaggatcggaagtgcgtgaccacacacgccgacatcaacgccgctcagaacctgcagaagcggttctggacaagaacccacggcttctacaaggtgtactgcaaggcctaccaggtggacggccagaccgtgtacatccctgagagcaaggaccagaagcagaagatcatcgaagagttcggcgagggctacttcattctgaaggacggggtgtacgaatgggtcaacgccggcaagctgaaaatcaagaagggcagctccaagcagagcagcagcgagctggtggatagcgacatcctgaaagacagcttcgacctggcctccgagctgaaaggcgaaaagctgatgctgtacagggaccccagcggcaatgtgttccccagcgacaaatggatggccgctggcgtgttcttcggaaagctggaacgcatcctgatcagcaagctgaccaaccagtactccatcagcaccatcgaggacgacagcagcaagcagtctatgaaaaggccggcggccacgaaaaaggccggccaggcaaaaaagaaaaagggatcctacccatacgatgttccagattacgcttatccctacgacgtgcctgattatgcatacccatatgatgtccccgactatgcctaa

SEQ ID NO: 7 - protein, 1361 aa, synthetic construct
  REGION 1..1361: note = BhCas12b GGSGGS-ABE8-Xten20at D306 polypeptide sequence
MAPKKKRKVGIHGVPAAATRSFILKIEPNEEVKKGLWKTHEVLNHGIAYYMNILKLIRQEAIYEHHEQDPKNPKKVSKAEIQAELWDFVLKMQKCNSFTHEVDKDEVFNILRELYEELVPSSVEKKGEANQLSNKFLYPLVDPNSQSGKGTASSGRKPRWYNLKIAGDPSWEEEKKKWEEDKKKDPLAKILGKLAEYGLIPLFIPYTDSNEPIVKEIKWMEKSRNQSVRRLDKDMFIQALERFLSWESWNLKVKEEYEKVEKEYKTLEERIKEDIQALKALEQYEKERQEQLLRDTLNTNEYRLSKRGLRGWREIIQKWLKMDGGSGGSSEVEFSHEYWMRHALTLAKRARDEREVPVGAVLVLNNRVIGEGWNRAIGLHDPTAHAEIMALRQGGLVMQNYRLYDATLYVTFEPCVMCAGAMIHSRIGRVVFGVRNAKTGAAGSLMDVLHHPGMNHRVEITEGILADECAALLCRFFRMPRRVFNAQKKAQSSTDGSSGSETPGTSESATPESSGENEPSEKYLEVFKDYQRKHPREAGDYSVYEFLSKKENHFIWRNHPEYPYLYATFCEIDKKKKDAKQQATFTLADPINHPLWVRFEERSGSNLNKYRILTEQLHTEKLKKKLTVQLDRLIYPTESGGWEEKGKVDIVLLPSRQFYNQIFLDIEEKGKHAFTYKDESIKFPLKGTLGGARVQFDRDHLRRYPHKVESGNVGRIYFNMTVNIEPTESPVSKSLKIHRDDFPKVVNFKPKELTEWIKDSKGKKLKSGIESLEIGLRVMSIDLGQRQAAAASIFEVVDQKPDIEGKLFFPIKGTELYAVHRASFNIKLPGETLVKSREVLRKAREDNLKLMNQKLNFLRNVLHFQQFEDITEREKRVTKWISRQENSDVPLVYQDELIQIRELMYKPYKDWVAFLKQLHKRLEVEIGKEVKHWRKSLSDGRKGLYGISLKNIDEIDRTRKFLLRWSLRPTEPGEVRRLEPGQRFAIDQLNHLNALKEDRLKKMANTIIMHALGYCYDVRKKKWQAKNPACQIILFEDLSNYNPYEERSRFENSKLMKWSRREIPRQVALQGEIYGLQVGEVGAQFSSRFHAKTGSPGIRCSVVTKEKLQDNRFFKNLQREGRLTLDKIAVLKEGDLYPDKGGEKFISLSKDRKCVTTHADINAAQNLQKRFWTRTHGFYKVYCKAYQVDGQTVYIPESKDQKQKIIEEFGEGYFILKDGVYEWVNAGKLKIKKGSSKQSSSELVDSDILKDSFDLASELKGEKLMLYRDPSGNVFPSDKWMAAGVFFGKLERILISKLTNQYSISTIEDDSSKQSMKRPAATKKAGQAKKKKGSYPYDVPDYAYPYDVPDYAYPYDVPDYA

SEQ ID NO: 8 - DNA, 4092 bp, synthetic construct
  misc_feature 1..4092: note = BhCas12b GGSGGS-ABE8-Xten20at D980 polynucleotide sequence
  misc_feature 1..6: note = Kozak sequence
  misc_feature 7..57: note = Sequence encoding N-terminal nuclear localization signal (NLS)
  misc_feature 58..2997: note = Sequence encoding BhCas12b
  misc_feature 2998..3015: note = Sequence encoding a linker
  misc_feature 3016..3513: note = Sequence encoding TadA*8
  misc_feature 3514..3573: note = Sequence encoding Xten20 linker
  misc_feature 3574..3954: note = Sequence encoding BhCas12b
  misc_feature 3955..4002: note = Sequence encoding C-terminal NLS
  misc_feature 4003..4008: note = Sequence encoding a GS linker
  misc_feature 4009..4089: note = Sequence encoding 3x hemagglutinin (HA) tag
  source 1..4092: mol_type = other DNA
gccaccatggccccaaagaagaagcggaaggtcggtatccacggagtcccagcagccgccaccagatccttcatcctgaagatcgagcccaacgaggaagtgaagaaaggcctctggaaaacccacgaggtgctgaaccacggaatcgcctactacatgaatatcctgaagctgatccggcaagaggccatctacgagcaccacgagcaggaccccaagaatcccaagaaggtgtccaaggccgagatccaggccgagctgtgggatttcgtgctgaagatgcagaagtgcaacagcttcacacacgaggtggacaaggacgaggtgttcaacatcctgagagagctgtacgaggaactggtgcccagcagcgtggaaaagaagggcgaagccaaccagctgagcaacaagtttctgtaccctctggtggaccccaacagccagtctggaaagggaacagccagcagcggcagaaagcccagatggtacaacctgaagattgccggcgatccctcctgggaagaagagaagaagaagtgggaagaagataagaaaaaggacccgctggccaagatcctgggcaagctggctgagtacggactgatccctctgttcatcccctacaccgacagcaacgagcccatcgtgaaagaaatcaagtggatggaaaagtcccggaaccagagcgtgcggcggctggataaggacatgttcattcaggccctggaacggttcctgagctgggagagctggaacctgaaagtgaaagaggaatacgagaaggtcgagaaagagtacaagaccctggaagagaggatcaaagaggacatccaggctctgaaggctctggaacagtatgagaaagagcggcaagaacagctgctgcgggacaccctgaacaccaacgagtaccggctgagcaagagaggccttagaggctggcgggaaatcatccagaaatggctgaaaatggacgagaacgagccctccgagaagtacctggaagtgttcaaggactaccagcggaagcaccctagagaggccggcgattacagcgtgtacgagttcctgtccaagaaagagaaccacttcatctggcggaatcaccctgagtacccctacctgtacgccaccttctgcgagatcgacaagaaaaagaaggacgccaagcagcaggccaccttcacactggccgatcctatcaatcaccctctgtgggtccgattcgaggaaagaagcggcagcaacctgaacaagtacagaatcctgaccgagcagctgcacaccgagaagctgaagaaaaagctgacagtgcagctggaccggctgatctaccctacagaatctggcggctgggaagagaagggcaaagtggacattgtgctgctgcccagccggcagttctacaaccagatcttcctggacatcgaggaaaagggcaagcacgccttcacctacaaggatgagagcatcaagttccctctgaagggcacactcggcggagccagagtgcagttcgacagagatcacctgagaagataccctcacaaggtggaaagcggcaacgtgggcagaatctacttcaacatgaccgtgaacatcgagcctacagagtccccagtgtccaagtctctgaagatccaccgggacgacttccccaaggtggtcaacttcaagcccaaagaactgaccgagtggatcaaggacagcaagggcaagaaactgaagtccggcatcgagtccctggaaatcggcctgagagtgatgagcatcgacctgggacagagacaggccgctgccgcctctattttcgaggtggtggatcagaagcccgacatcgaaggcaagctgtttttcccaatcaagggcaccgagctgtatgccgtgcacagagccagcttcaacatcaagctgcccggcgagacactggtcaagagcagagaagtgctgcggaaggccagagaggacaatctgaaactgatgaaccagaagctcaacttcctgcggaacgtgctgcacttccagcagttcgaggacatcaccgagagagagaagcgggtcaccaagtggatcagcagacaagagaacagcgacgtgcccctggtgtaccaggatgagctgatccagatccgcgagctgatgtacaagccttacaaggactgggtcgccttcctgaagcagctccacaagagactggaagtcgagatcggcaaagaagtgaagcactggcggaagtccctgagcgacggaagaaagggcctgtacggcatctccctgaagaacatcgacgagatcgatcggacccggaagttcctgctgagatggtccctgaggcctaccgaacctggcgaagtgcgtagactggaacccggccagagattcgccatcgaccagctgaatcacctgaacgccctgaaagaagatcggctgaagaagatggccaacaccatcatcatgcacgccctgggctactgctacgacgtgcggaagaagaaatggcaggctaagaaccccgcctgccagatcatcctgttcgaggatctgagcaactacaacccctacgaggaaaggtcccgcttcgagaacagcaagctcatgaagtggtccagacgcgagatccccagacaggttgcactgcagggcgagatctatggcctgcaagtgggagaagtgggcgctcagttcagcagcagattccacgccaagacaggcagccctggcatcagatgtagcgtcgtgaccaaagagaagctgcaggacaatcggttcttcaagaatctgcagagagagggcagactgaccctggacaaaatcgccgtgctgaaagagggcgatctgtacccagacaaaggcggcgagaagttcatcagcctgagcaaggatcggaagtgcgtgaccacacacgccgacatcaacgccgctcagaacctgcagaagcggttctggacaagaacccacggcttctacaaggtgtactgcaaggcctaccaggtggacggaggctctggaggaagctccgaagtcgagttttcccatgagtactggatgagacacgcattgactctcgcaaagagggctcgagatgaacgcgaggtgcccgtgggggcagtactcgtgctcaacaatcgcgtaatcggcgaaggttggaatagggcaatcggactccacgaccccactgcacatgcggaaatcatggcccttcgacagggagggcttgtgatgcagaattatcgactttatgatgcgacgctgtacgtcacgtttgaaccttgcgtaatgtgcgcgggagctatgattcactcccgcattggacgagttgtattcggtgttcgcaacgccaagacgggtgccgcaggttcactgatggacgtgctgcatcatccaggcatgaaccaccgggtagaaatcacagaaggcatattggcggacgaatgtgcggcgctgttgtgtcgtttttttcgcatgcccaggcgggtctttaacgcccagaaaaaagcacaatcctctactgacggctcttctggatctgaaacacctggcacaagcgagagcgccacccctgagagctctggcggccagaccgtgtacatccctgagagcaaggaccagaagcagaagatcatcgaagagttcggcgagggctacttcattctgaaggacggggtgtacgaatgggtcaacgccggcaagctgaaaatcaagaagggcagctccaagcagagcagcagcgagctggtggatagcgacatcctgaaagacagcttcgacctggcctccgagctgaaaggcgaaaagctgatgctgtacagggaccccagcggcaatgtgttccccagcgacaaatggatggccgctggcgtgttcttcggaaagctggaacgcatcctgatcagcaagctgaccaaccagtactccatcagcaccatcgaggacgacagcagcaagcagtctatgaaaaggccggcggccacgaaaaaggccggccaggcaaaaaagaaaaagggatcctacccatacgatgttccagattacgcttatccctacgacgtgcctgattatgcatacccatatgatgtccccgactatgcctaa

SEQ ID NO: 9 - protein, 1361 aa, synthetic construct
  REGION 1..1361: note = BhCas12b GGSGGS-ABE8-Xten20at D980 polypeptide sequence
MAPKKKRKVGIHGVPAAATRSFILKIEPNEEVKKGLWKTHEVLNHGIAYYMNILKLIRQEAIYEHHEQDPKNPKKVSKAEIQAELWDFVLKMQKCNSFTHEVDKDEVFNILRELYEELVPSSVEKKGEANQLSNKFLYPLVDPNSQSGKGTASSGRKPRWYNLKIAGDPSWEEEKKKWEEDKKKDPLAKILGKLAEYGLIPLFIPYTDSNEPIVKEIKWMEKSRNQSVRRLDKDMFIQALERFLSWESWNLKVKEEYEKVEKEYKTLEERIKEDIQALKALEQYEKERQEQLLRDTLNTNEYRLSKRGLRGWREIIQKWLKMDENEPSEKYLEVFKDYQRKHPREAGDYSVYEFLSKKENHFIWRNHPEYPYLYATFCEIDKKKKDAKQQATFTLADPINHPLWVRFEERSGSNLNKYRILTEQLHTEKLKKKLTVQLDRLIYPTESGGWEEKGKVDIVLLPSRQFYNQIFLDIEEKGKHAFTYKDESIKFPLKGTLGGARVQFDRDHLRRYPHKVESGNVGRIYFNMTVNIEPTESPVSKSLKIHRDDFPKVVNFKPKELTEWIKDSKGKKLKSGIESLEIGLRVMSIDLGQRQAAAASIFEVVDQKPDIEGKLFFPIKGTELYAVHRASFNIKLPGETLVKSREVLRKAREDNLKLMNQKLNFLRNVLHFQQFEDITEREKRVTKWISRQENSDVPLVYQDELIQIRELMYKPYKDWVAFLKQLHKRLEVEIGKEVKHWRKSLSDGRKGLYGISLKNIDEIDRTRKFLLRWSLRPTEPGEVRRLEPGQRFAIDQLNHLNALKEDRLKKMANTIIMHALGYCYDVRKKKWQAKNPACQIILFEDLSNYNPYEERSRFENSKLMKWSRREIPRQVALQGEIYGLQVGEVGAQFSSRFHAKTGSPGIRCSVVTKEKLQDNRFFKNLQREGRLTLDKIAVLKEGDLYPDKGGEKFISLSKDRKCVTTHADINAAQNLQKRFWTRTHGFYKVYCKAYQVDGGSGGSSEVEFSHEYWMRHALTLAKRARDEREVPVGAVLVLNNRVIGEGWNRAIGLHDPTAHAEIMALRQGGLVMQNYRLYDATLYVTFEPCVMCAGAMIHSRIGRVVFGVRNAKTGAAGSLMDVLHHPGMNHRVEITEGILADECAALLCRFFRMPRRVFNAQKKAQSSTDGSSGSETPGTSESATPESSGGQTVYIPESKDQKQKIIEEFGEGYFILKDGVYEWVNAGKLKIKKGSSKQSSSELVDSDILKDSFDLASELKGEKLMLYRDPSGNVFPSDKWMAAGVFFGKLERILISKLTNQYSISTIEDDSSKQSMKRPAATKKAGQAKKKKGSYPYDVPDYAYPYDVPDYAYPYDVPDYA

SEQ ID NO: 10 - DNA, 4092 bp, synthetic construct
  misc_feature 1..4092: note = BhCas12b GGSGGS-ABE8-Xten20at K1019 polynucleotide sequence
  misc_feature 1..6: note = Kozak sequence
  misc_feature 7..57: note = Sequence encoding N-terminal nuclear localization signal (NLS)
  misc_feature 58..3114: note = Sequence encoding BhCas12b
  misc_feature 3115..3132: note = Sequence encoding a linker
  misc_feature 3133..3630: note = Sequence encoding TadA*8
  misc_feature 3631..3690: note = Sequence encoding Xten20 linker
  misc_feature 3691..3954: note = Sequence encoding BhCas12b
  misc_feature 3955..4002: note = Sequence encoding C-terminal NLS
  misc_feature 4003..4008: note = Sequence encoding GS linker
  misc_feature 4009..4089: note = Sequence encoding 3x hemagglutinin (HA) tag
  source 1..4092: mol_type = other DNA
gccaccatggccccaaagaagaagcggaaggtcggtatccacggagtcccagcagccgccaccagatccttcatcctgaagatcgagcccaacgaggaagtgaagaaaggcctctggaaaacccacgaggtgctgaaccacggaatcgcctactacatgaatatcctgaagctgatccggcaagaggccatctacgagcaccacgagcaggaccccaagaatcccaagaaggtgtccaaggccgagatccaggccgagctgtgggatttcgtgctgaagatgcagaagtgcaacagcttcacacacgaggtggacaaggacgaggtgttcaacatcctgagagagctgtacgaggaactggtgcccagcagcgtggaaaagaagggcgaagccaaccagctgagcaacaagtttctgtaccctctggtggaccccaacagccagtctggaaagggaacagccagcagcggcagaaagcccagatggtacaacctgaagattgccggcgatccctcctgggaagaagagaagaagaagtgggaagaagataagaaaaaggacccgctggccaagatcctgggcaagctggctgagtacggactgatccctctgttcatcccctacaccgacagcaacgagcccatcgtgaaagaaatcaagtggatggaaaagtcccggaaccagagcgtgcggcggctggataaggacatgttcattcaggccctggaacggttcctgagctgggagagctggaacctgaaagtgaaagaggaatacgagaaggtcgagaaagagtacaagaccctggaagagaggatcaaagaggacatccaggctctgaaggctctggaacagtatgagaaagagcggcaagaacagctgctgcgggacaccctgaacaccaacgagtaccggctgagcaagagaggccttagaggctggcgggaaatcatccagaaatggctgaaaatggacgagaacgagccctccgagaagtacctggaagtgttcaaggactaccagcggaagcaccctagagaggccggcgattacagcgtgtacgagttcctgtccaagaaagagaaccacttcatctggcggaatcaccctgagtacccctacctgtacgccaccttctgcgagatcgacaagaaaaagaaggacgccaagcagcaggccaccttcacactggccgatcctatcaatcaccctctgtgggtccgattcgaggaaagaagcggcagcaacctgaacaagtacagaatcctgaccgagcagctgcacaccgagaagctgaagaaaaagctgacagtgcagctggaccggctgatctaccctacagaatctggcggctgggaagagaagggcaaagtggacattgtgctgctgcccagccggcagttctacaaccagatcttcctggacatcgaggaaaagggcaagcacgccttcacctacaaggatgagagcatcaagttccctctgaagggcacactcggcggagccagagtgcagttcgacagagatcacctgagaagataccctcacaaggtggaaagcggcaacgtgggcagaatctacttcaacatgaccgtgaacatcgagcctacagagtccccagtgtccaagtctctgaagatccaccgggacgacttccccaaggtggtcaacttcaagcccaaagaactgaccgagtggatcaaggacagcaagggcaagaaactgaagtccggcatcgagtccctggaaatcggcctgagagtgatgagcatcgacctgggacagagacaggccgctgccgcctctattttcgaggtggtggatcagaagcccgacatcgaaggcaagctgtttttcccaatcaagggcaccgagctgtatgccgtgcacagagccagcttcaacatcaagctgcccggcgagacactggtcaagagcagagaagtgctgcggaaggccagagaggacaatctgaaactgatgaaccagaagctcaacttcctgcggaacgtgctgcacttccagcagttcgaggacatcaccgagagagagaagcgggtcaccaagtggatcagcagacaagagaacagcgacgtgcccctggtgtaccaggatgagctgatccagatccgcgagctgatgtacaagccttacaaggactgggtcgccttcctgaagcagctccacaagagactggaagtcgagatcggcaaagaagtgaagcactggcggaagtccctgagcgacggaagaaagggcctgtacggcatctccctgaagaacatcgacgagatcgatcggacccggaagttcctgctgagatggtccctgaggcctaccgaacctggcgaagtgcgtagactggaacccggccagagattcgccatcgaccagctgaatcacctgaacgccctgaaagaagatcggctgaagaagatggccaacaccatcatcatgcacgccctgggctactgctacgacgtgcggaagaagaaatggcaggctaagaaccccgcctgccagatcatcctgttcgaggatctgagcaactacaacccctacgaggaaaggtcccgcttcgagaacagcaagctcatgaagtggtccagacgcgagatccccagacaggttgcactgcagggcgagatctatggcctgcaagtgggagaagtgggcgctcagttcagcagcagattccacgccaagacaggcagccctggcatcagatgtagcgtcgtgaccaaagagaagctgcaggacaatcggttcttcaagaatctgcagagagagggcagactgaccctggacaaaatcgccgtgctgaaagagggcgatctgtacccagacaaaggcggcgagaagttcatcagcctgagcaaggatcggaagtgcgtgaccacacacgccgacatcaacgccgctcagaacctgcagaagcggttctggacaagaacccacggcttctacaaggtgtactgcaaggcctaccaggtggacggccagaccgtgtacatccctgagagcaaggaccagaagcagaagatcatcgaagagttcggcgagggctacttcattctgaaggacggggtgtacgaatgggtcaacgccggcaagggaggctctggaggaagctccgaagtcgagttttcccatgagtactggatgagacacgcattgactctcgcaaagagggctcgagatgaacgcgaggtgcccgtgggggcagtactcgtgctcaacaatcgcgtaatcggcgaaggttggaatagggcaatcggactccacgaccccactgcacatgcggaaatcatggcccttcgacagggagggcttgtgatgcagaattatcgactttatgatgcgacgctgtacgtcacgtttgaaccttgcgtaatgtgcgcgggagctatgattcactcccgcattggacgagttgtattcggtgttcgcaacgccaagacgggtgccgcaggttcactgatggacgtgctgcatcatccaggcatgaaccaccgggtagaaatcacagaaggcatattggcggacgaatgtgcggcgctgttgtgtcgtttttttcgcatgcccaggcgggtctttaacgcccagaaaaaagcacaatcctctactgacggctcttctggatctgaaacacctggcacaagcgagagcgccacccctgagagctctggcctgaaaatcaagaagggcagctccaagcagagcagcagcgagctggtggatagcgacatcctgaaagacagcttcgacctggcctccgagctgaaaggcgaaaagctgatgctgtacagggaccccagcggcaatgtgttccccagcgacaaatggatggccgctggcgtgttcttcggaaagctggaacgcatcctgatcagcaagctgaccaaccagtactccatcagcaccatcgaggacgacagcagcaagcagtctatgaaaaggccggcggccacgaaaaaggccggccaggcaaaaaagaaaaagggatcctacccatacgatgttccagattacgcttatccctacgacgtgcctgattatgcatacccatatgatgtccccgactatgcctaa

SEQ ID NO: 11 - protein, 1361 aa, synthetic construct
  REGION 1..1361: note = BhCas12b GGSGGS-ABE8-Xten20at K1019 polypeptide sequence
MAPKKKRKVGIHGVPAAATRSFILKIEPNEEVKKGLWKTHEVLNHGIAYYMNILKLIRQEAIYEHHEQDPKNPKKVSKAEIQAELWDFVLKMQKCNSFTHEVDKDEVFNILRELYEELVPSSVEKKGEANQLSNKFLYPLVDPNSQSGKGTASSGRKPRWYNLKIAGDPSWEEEKKKWEEDKKKDPLAKILGKLAEYGLIPLFIPYTDSNEPIVKEIKWMEKSRNQSVRRLDKDMFIQALERFLSWESWNLKVKEEYEKVEKEYKTLEERIKEDIQALKALEQYEKERQEQLLRDTLNTNEYRLSKRGLRGWREIIQKWLKMDENEPSEKYLEVFKDYQRKHPREAGDYSVYEFLSKKENHFIWRNHPEYPYLYATFCEIDKKKKDAKQQATFTLADPINHPLWVRFEERSGSNLNKYRILTEQLHTEKLKKKLTVQLDRLIYPTESGGWEEKGKVDIVLLPSRQFYNQIFLDIEEKGKHAFTYKDESIKFPLKGTLGGARVQFDRDHLRRYPHKVESGNVGRIYFNMTVNIEPTESPVSKSLKIHRDDFPKVVNFKPKELTEWIKDSKGKKLKSGIESLEIGLRVMSIDLGQRQAAAASIFEVVDQKPDIEGKLFFPIKGTELYAVHRASFNIKLPGETLVKSREVLRKAREDNLKLMNQKLNFLRNVLHFQQFEDITEREKRVTKWISRQENSDVPLVYQDELIQIRELMYKPYKDWVAFLKQLHKRLEVEIGKEVKHWRKSLSDGRKGLYGISLKNIDEIDRTRKFLLRWSLRPTEPGEVRRLEPGQRFAIDQLNHLNALKEDRLKKMANTIIMHALGYCYDVRKKKWQAKNPACQIILFEDLSNYNPYEERSRFENSKLMKWSRREIPRQVALQGEIYGLQVGEVGAQFSSRFHAKTGSPGIRCSVVTKEKLQDNRFFKNLQREGRLTLDKIAVLKEGDLYPDKGGEKFISLSKDRKCVTTHADINAAQNLQKRFWTRTHGFYKVYCKAYQVDGQTVYIPESKDQKQKIIEEFGEGYFILKDGVYEWVNAGKGGSGGSSEVEFSHEYWMRHALTLAKRARDEREVPVGAVLVLNNRVIGEGWNRAIGLHDPTAHAEIMALRQGGLVMQNYRLYDATLYVTFEPCVMCAGAMIHSRIGRVVFGVRNAKTGAAGSLMDVLHHPGMNHRVEITEGILADECAALLCRFFRMPRRVFNAQKKAQSSTDGSSGSETPGTSESATPESSGLKIKKGSSKQSSSELVDSDILKDSFDLASELKGEKLMLYRDPSGNVFPSDKWMAAGVFFGKLERILISKLTNQYSISTIEDDSSKQSMKRPAATKKAGQAKKKKGSYPYDVPDYAYPYDVPDYAYPYDVPDYA

SEQ ID NO: 12 - protein, 208 aa, Petromyzon marinus
  REGION 1..208: note = MISC_FEATURE - tr|A5H718|A5H718_PETMA Cytosine deaminase OS=Petromyzon marinusOX=7757 PE=2 SV=1 amino acid sequence; PmCDA1 polypeptide sequence
MTDAEYVRIHEKLDIYTFKKQFFNNKKSVSHRCYVLFELKRRGERRACFWGYAVNKPQSGTERGIHAEIFSIRKVEEYLRDNPGQFTINWYSSWSPCADCAEKILEWYNQELRGNGHTLKIWACKLYYEKNARNQIGLWNLRDNGVGLNVMVSEHYQCCRKIFIQSSHNQLNENRWLEKTLKRAEKRRSELSIMIQVKILHTTKSPAV

SEQ ID NO: 13 - DNA, 766 bp, Petromyzon marinus
  misc_feature 1..766: note = EF094822.1 Petromyzon marinus isolate PmCDA.21 cytosine deaminase mRNA, complete cds; PmCDA1 polynucleotide sequence
  source 1..766: mol_type = genomic DNA
tgacacgacacagccgtgtatatgaggaagggtagctggatggggggggggggaatacgttcagagaggacattagcgagcgtcttgttggtggccttgagtctagacacctgcagacatgaccgacgctgagtacgtgagaatccatgagaagttggacatctacacgtttaagaaacagtttttcaacaacaaaaaatccgtgtcgcatagatgctacgttctctttgaattaaaacgacggggtgaacgtagagcgtgtttttggggctatgctgtgaataaaccacagagcgggacagaacgtggaattcacgccgaaatctttagcattagaaaagtcgaagaatacctgcgcgacaaccccggacaattcacgataaattggtactcatcctggagtccttgtgcagattgcgctgaaaagatcttagaatggtataaccaggagctgcgggggaacggccacactttgaaaatctgggcttgcaaactctattacgagaaaaatgcgaggaatcaaattgggctgtggaacctcagagataacggggttgggttgaatgtaatggtaagtgaacactaccaatgttgcaggaaaatattcatccaatcgtcgcacaatcaattgaatgagaatagatggcttgagaagactttgaagcgagctgaaaaacgacggagcgagttgtccattatgattcaggtaaaaatactccacaccactaagagtcctgctgtttaagaggctatgcggatggttttc

SEQ ID NO: 14 - protein, 145 aa, Homo sapiens
  REGION 1..145: note = MISC_FEATURE - tr|Q6QJ80|Q6QJ80_HUMAN Activation-induced cytidine deaminase OS=Homo sapiens; OX = 9606 GN=AICDA PE=2 SV=1; AID polypeptide sequence
MDSLLMNRRKFLYQFKNVRWAKGRRETYLCYVVKRRDSATSFSLDFGYLRNKNGCHVELLFLRYISDWDLDPGRCYRVTWFTSWSPCYDCARHVADFLRGNPNLSLRIFTARLYFCEDRKAEPEGLRRLHRAGVQIAIMTFKAPV

SEQ ID NO: 15 - DNA, 10681 bp, Homo sapiens
  misc_feature 1..10681: note = NG_011588.1:5001-15681 Homo sapiens activation induced cytidine deaminase (AICDA), RefSeqGene (LRG_17) on chromosome 12; nucleic acid sequence of the CDS of human AID; polynucleotide sequence
  source 1..10681: mol_type = genomic DNA
agagaaccatcattaattgaagtgagatttttctggcctgagacttgcagggaggcaagaagacactctggacaccactatggacaggtaaagaggcagtcttctcgtgggtgattgcactggccttcctctcagagcaaatctgagtaatgagactggtagctatccctttctctcatgtaactgtctgactgataagatcagcttgatcaatatgcatatatattttttgatctgtctccttttcttctattcagatcttatacgctgtcagcccaattctttctgtttcagacttctcttgatttccctctttttcatgtggcaaaagaagtagtgcgtacaatgtactgattcgtcctgagatttgtaccatggttgaaactaatttatggtaataatattaacatagcaaatctttagagactcaaatcatgaaaaggtaatagcagtactgtactaaaaacggtagtgctaattttcgtaataattttgtaaatattcaacagtaaaacaacttgaagacacactttcctagggaggcgttactgaaataatttagctatagtaagaaaatttgtaattttagaaatgccaagcattctaaattaattgcttgaaagtcactatgattgtgtccattataaggagacaaattcattcaagcaagttatttaatgttaaaggcccaattgttaggcagttaatggcacttttactattaactaatctttccatttgttcagacgtagcttaacttacctcttaggtgtgaatttggttaaggtcctcataatgtctttatgtgcagtttttgataggttattgtcatagaacttattctattcctacatttatgattactatggatgtatgagaataacacctaatccttatactttacctcaatttaactcctttataaagaacttacattacagaataaagattttttaaaaatatatttttttgtagagacagggtcttagcccagccgaggctggtctctaagtcctggcccaagcgatcctcctgcctgggcctcctaaagtgctggaattatagacatgagccatcacatccaatatacagaataaagatttttaatggaggatttaatgttcttcagaaaattttcttgaggtcagacaatgtcaaatgtctcctcagtttacactgagattttgaaaacaagtctgagctataggtccttgtgaagggtccattggaaatacttgttcaaagtaaaatggaaagcaaaggtaaaatcagcagttgaaattcagagaaagacagaaaaggagaaaagatgaaattcaacaggacagaagggaaatatattatcattaaggaggacagtatctgtagagctcattagtgatggcaaaatgacttggtcaggattatttttaacccgcttgtttctggtttgcacggctggggatgcagctagggttctgcctcagggagcacagctgtccagagcagctgtcagcctgcaagcctgaaacactccctcggtaaagtccttcctactcaggacagaaatgacgagaacagggagctggaaacaggcccctaaccagagaagggaagtaatggatcaacaaagttaactagcaggtcaggatcacgcaattcatttcactctgactggtaacatgtgacagaaacagtgtaggcttattgtattttcatgtagagtaggacccaaaaatccacccaaagtcctttatctatgccacatccttcttatctatacttccaggacactttttcttccttatgataaggctctctctctctccacacacacacacacacacacacacacacacacacacacacacacaaacacacaccccgccaaccaaggtgcatgtaaaaagatgtagattcctctgcctttctcatctacacagcccaggagggtaagttaatataagagggatttattggtaagagatgatgcttaatctgtttaacactgggcctcaaagagagaatttcttttcttctgtacttattaagcacctattatgtgttgagcttatatatacaaagggttattatatgctaatatagtaatagtaatggtggttggtactatggtaattaccataaaaattattatccttttaaaataaagctaattattattggatcttttttagtattcattttatgttttttatgtttttgattttttaaaagacaatctcaccctgttacccaggctggagtgcagtggtgcaatcatagctttctgcagtcttgaactcctgggctcaagcaatcctcctgccttggcctcccaaagtgttgggatacagtcatgagccactgcatctggcctaggatccatttagattaaaatatgcattttaaattttaaaataatatggctaatttttaccttatgtaatgtgtatactggcaataaatctagtttgctgcctaaagtttaaagtgctttccagtaagcttcatgtacgtgaggggagacatttaaagtgaaacagacagccaggtgtggtggctcacgcctgtaatcccagcactctgggaggctgaggtgggtggatcgcttgagccctggagttcaagaccagcctgagcaacatggcaaaacgctgtttctataacaaaaattagccgggcatggtggcatgtgcctgtggtcccagctactagggggctgaggcaggagaatcgttggagcccaggaggtcaaggctgcactgagcagtgcttgcgccactgcactccagcctgggtgacaggaccagaccttgcctcaaaaaaataagaagaaaaattaaaaataaatggaaacaactacaaagagctgttgtcctagatgagctacttagttaggctgatattttggtatttaacttttaaagtcagggtctgtcacctgcactacattattaaaatatcaattctcaatgtatatccacacaaagactggtacgtgaatgttcatagtacctttattcacaaaaccccaaagtagagactatccaaatatccatcaacaagtgaacaaataaacaaaatgtgctatatccatgcaatggaataccaccctgcagtacaaagaagctacttggggatgaatcccaaagtcatgacgctaaatgaaagagtcagacatgaaggaggagataatgtatgccatacgaaattctagaaaatgaaagtaacttatagttacagaaagcaaatcagggcaggcatagaggctcacacctgtaatcccagcactttgagaggccacgtgggaagattgctagaactcaggagttcaagaccagcctgggcaacacagtgaaactccattctccacaaaaatgggaaaaaaagaaagcaaatcagtggttgtcctgtggggaggggaaggactgcaaagagggaagaagctctggtggggtgagggtggtgattcaggttctgtatcctgactgtggtagcagtttggggtgtttacatccaaaaatattcgtagaattatgcatcttaaatgggtggagtttactgtatgtaaattatacctcaatgtaagaaaaaataatgtgtaagaaaactttcaattctcttgccagcaaacgttattcaaattcctgagccctttacttcgcaaattctctgcacttctgccccgtaccattaggtgacagcactagctccacaaattggataaatgcatttctggaaaagactagggacaaaatccaggcatcacttgtgctttcatatcaaccatgctgtacagcttgtgttgctgtctgcagctgcaatggggactcttgatttctttaaggaaacttgggttaccagagtatttccacaaatgctattcaaattagtgcttatgatatgcaagacactgtgctaggagccagaaaacaaagaggaggagaaatcagtcattatgtgggaacaacatagcaagatatttagatcattttgactagttaaaaaagcagcagagtacaaaatcacacatgcaatcagtataatccaaatcatgtaaatatgtgcctgtagaaagactagaggaataaacacaagaatcttaacagtcattgtcattagacactaagtctaattattattattagacactatgatatttgagatttaaaaaatctttaatattttaaaatttagagctcttctatttttccatagtattcaagtttgacaatgatcaagtattactctttctttttttttttttttttttttttttgagatggagttttggtcttgttgcccatgctggagtggaatggcatgaccatagctcactgcaacctccacctcctgggttcaagcaaagctgtcgcctcagcctcccgggtagatgggattacaggcgcccaccaccacactcggctaatgtttgtatttttagtagagatggggtttcaccatgttggccaggctggtctcaaactcctgacctcagaggatccacctgcctcagcctcccaaagtgctgggattacagatgtaggccactgcgcccggccaagtattgctcttatacattaaaaaacaggtgtgagccactgcgcccagccaggtattgctcttatacattaaaaaataggccggtgcagtggctcacgcctgtaatcccagcactttgggaagccaaggcgggcagaacacccgaggtcaggagtccaaggccagcctggccaagatggtgaaaccccgtctctattaaaaatacaaacattacctgggcatgatggtgggcgcctgtaatcccagctactcaggaggctgaggcaggaggatccgcggagcctggcagatctgcctgagcctgggaggttgaggctacagtaagccaagatcatgccagtatacttcagcctgggcgacaaagtgagaccgtaacaaaaaaaaaaaaatttaaaaaaagaaatttagatcaagatccaactgtaaaaagtggcctaaacaccacattaaagagtttggagtttattctgcaggcagaagagaaccatcagggggtcttcagcatgggaatggcatggtgcacctggtttttgtgagatcatggtggtgacagtgtggggaatgttattttggagggactggaggcagacagaccggttaaaaggccagcacaacagataaggaggaagaagatgagggcttggaccgaagcagagaagagcaaacagggaaggtacaaattcaagaaatattggggggtttgaatcaacacatttagatgattaattaaatatgaggactgaggaataagaaatgagtcaaggatggttccaggctgctaggctgcttacctgaggtggcaaagtcgggaggagtggcagtttaggacagggggcagttgaggaatattgttttgatcattttgagtttgaggtacaagttggacacttaggtaaagactggaggggaaatctgaatatacaattatgggactgaggaacaagtttattttattttttgtttcgttttcttgttgaagaacaaatttaattgtaatcccaagtcatcagcatctagaagacagtggcaggaggtgactgtcttgtgggtaagggtttggggtccttgatgagtatctctcaattggccttaaatataagcaggaaaaggagtttatgatggattccaggctcagcagggctcaggagggctcaggcagccagcagaggaagtcagagcatcttctttggtttagcccaagtaatgacttccttaaaaagctgaaggaaaatccagagtgaccagattataaactgtactcttgcattttctctccctcctctcacccacagcctcttgatgaaccggaggaagtttctttaccaattcaaaaatgtccgctgggctaagggtcggcgtgagacctacctgtgctacgtagtgaagaggcgtgacagtgctacatccttttcactggactttggttatcttcgcaataaggtatcaattaaagtcggctttgcaagcagtttaatggtcaactgtgagtgcttttagagccacctgctgatggtattacttccatccttttttggcatttgtgtctctatcacattcctcaaatccttttttttatttctttttccatgtccatgcacccatattagacatggcccaaaatatgtgatttaattcctccccagtaatgctgggcaccctaataccactccttccttcagtgccaagaacaactgctcccaaactgtttaccagctttcctcagcatctgaattgcctttgagattaattaagctaaaagcatttttatatgggagaatattatcagcttgtccaagcaaaaattttaaatgtgaaaaacaaattgtgtcttaagcatttttgaaaattaaggaagaagaatttgggaaaaaattaacggtggctcaattctgtcttccaaatgatttcttttccctcctactcacatgggtcgtaggccagtgaatacattcaacatggtgatccccagaaaactcagagaagcctcggctgatgattaattaaattgatctttcggctacccgagagaattacatttccaagagacttcttcaccaaaatccagatgggtttacataaacttctgcccacgggtatctcctctctcctaacacgctgtgacgtctgggcttggtggaatctcagggaagcatccgtggggtggaaggtcatcgtctggctcgttgtttgatggttatattaccatgcaattttctttgcctacatttgtattgaatacatcccaatctccttcctattcggtgacatgacacattctatttcagaaggctttgattttatcaagcactttcatttacttctcatggcagtgcctattacttctcttacaatacccatctgtctgctttaccaaaatctatttccccttttcagatcctcccaaatggtcctcataaactgtcctgcctccacctagtggtccaggtatatttccacaatgttacatcaacaggcacttctagccattttccttctcaaaaggtgcaaaaagcaacttcataaacacaaattaaatcttcggtgaggtagtgtgatgctgcttcctcccaactcagcgcacttcgtcttcctcattccacaaaaacccatagccttccttcactctgcaggactagtgctgccaagggttcagctctacctactggtgtgctcttttgagcaagttgcttagcctctctgtaacacaaggacaatagctgcaagcatccccaaagatcattgcaggagacaatgactaaggctaccagagccgcaataaaagtcagtgaattttagcgtggtcctctctgtctctccagaacggctgccacgtggaattgctcttcctccgctacatctcggactgggacctagaccctggccgctgctaccgcgtcacctggttcacctcctggagcccctgctacgactgtgcccgacatgtggccgactttctgcgagggaaccccaacctcagtctgaggatcttcaccgcgcgcctctacttctgtgaggaccgcaaggctgagcccgaggggctgcggcggctgcaccgcgccggggtgcaaatagccatcatgaccttcaaaggtgcgaaagggccttccgcgcaggcgcagtgcagcagcccgcattcgggattgcgatgcggaatgaatgagttagtggggaagctcgaggggaagaagtgggcggggattctggttcacctctggagccgaaattaaagattagaagcagagaaaagagtgaatggctcagagacaaggccccgaggaaatgagaaaatggggccagggttgcttctttcccctcgatttggaacctgaactgtcttctacccccatatccccgcctttttttcctttttttttttttgaagattatttttactgctggaatacttttgtagaaaaccacgaaagaactttcaaagcctgggaagggctgcatgaaaattcagttcgtctctccagacagcttcggcgcatccttttggtaaggggcttcctcgctttttaaattttctttctttctctacagtcttttttggagtttcgtatatttcttatattttcttattgttcaatcactctcagttttcatctgatgaaaactttatttctcctccacatcagctttttcttctgctgtttcaccattcagagccctctgctaaggttccttttccctcccttttctttcttttgttgtttcacatctttaaatttctgtctctccccagggttgcgtttccttcctggtcagaattcttttctcctttttttttttttttttttttttttttaaacaaacaaacaaaaaacccaaaaaaactctttcccaatttactttcttccaacatgttacaaagccatccactcagtttagaagactctccggccccaccgacccccaacctcgttttgaagccattcactcaatttgcttctctctttctctacagcccctgtatgaggttgatgacttacgagacgcatttcgtactttgggactttgatagcaacttccaggaatgtcacacacgatgaaatatctctgctgaagacagtggataaaaaacagtccttcaagtcttctctgtttttattcttcaactctcactttcttagagtttacagaaaaaatatttatatacgactctttaaaaagatctatgtcttgaaaatagagaaggaacacaggtctggccagggacgtgctgcaattggtgcagttttgaatgcaacattgtcccctactgggaataacagaactgcaggacctgggagcatcctaaagtgtcaacgtttttctatgacttttaggtaggatgagagcagaaggtagatcctaaaaagcatggtgagaggatcaaatgtttttatatcaacatcctttattatttgattcatttgagttaacagtggtgttagtgatagatttttctattcttttcccttgacgtttactttcaagtaacacaaactcttccatcaggccatgatctataggacctcctaatgagagtatctgggtgattgtgaccccaaaccatctctccaaagcattaatatccaatcatgcgctgtatgttttaatcagcagaagcatgtttttatgtttgtacaaaagaagattgttatgggtggggatggaggtatagaccatgcatggtcaccttcaagctactttaataaaggatcttaaaatgggcaggaggactgtgaacaagacaccctaataatgggttgatgtctgaagtagcaaatcttctggaaacgcaaactcttttaaggaagtccctaatttagaaacacccacaaacttcacatatcataattagcaaacaattggaaggaagttgcttgaatgttggggagaggaaaatctattggctctcgtgggtctcttcatctcagaaatgccaatcaggtcaaggtttgctacattttgtatgtgtgtgatgcttctcccaaaggtatattaactatataagagagttgtgacaaaacagaatgataaagctgcgaaccgtggcacacgctcatagttctagctgcttgggaggttgaggagggaggatggcttgaacacaggtgttcaaggccagcctgggcaacataacaagatcctgtctctcaaaaaaaaaaaaaaaaaaaagaaagagagagggccgggcgtggtggctcacgcctgtaatcccagcactttgggaggccgagccgggcggatcacctgtggtcaggagtttgagaccagcctggccaacatggcaaaaccccgtctgtactcaaaatgcaaaaattagccaggcgtggtagcaggcacctgtaatcccagctacttgggaggctgaggcaggagaatcgcttgaacccaggaggtggaggttgcagtaagctgagatcgtgccgttgcactccagcctgggcgacaagagcaagactctgtctcagaaaaaaaaaaaaaaaagagagagagagagaaagagaacaatatttgggagagaaggatggggaagcattgcaaggaaattgtgctttatccaacaaaatgtaaggagccaataagggatccctatttgtctcttttggtgtctatttgtccctaacaactgtctttgacagtgagaaaaatattcagaataaccatatccctgtgccgttattacctagcaacccttgcaatgaagatgagcagatccacaggaaaacttgaatgcacaactgtcttattttaatcttattgtacataagtttgtaaaagagttaaaaattgttacttcatgtattcatttatattttatattattttgcgtctaatgattttttattaacatgatttccttttctgatatattgaaatggagtctcaaagcttcataaatttataactttagaaatgattctaataacaacgtatgtaattgtaacattgcagtaatggtgctacgaagccatttctcttgatttttagtaaacttttatgacagcaaatttgcttctggctcactttcaatcagttaaataaatgataaataattttggaagctgtgaagataaaataccaaataaaataatataaaagtgatttatatgaagttaaaataaaaaatcagtatgatggaataaacttg

SEQ ID NO: 16 - protein, 198 aa, Homo sapiens [sequence omitted]

SEQ ID NO: 17 - protein, 198 aa, Canis lupus
  REGION 1..198: note = MISC_FEATURE - Canine AID (clAID) polypeptide sequence
  REGION 1..30: note = MISC_FEATURE - Nuclear localization sequence
  REGION 183..198: note = MISC_FEATURE - Nuclear export signal
MDSLLMKQRKFLYHFKNVRWAKGRHETYLCYVVKRRDSATSFSLDFGHLRNKSGCHVELLFLRYISDWDLDPGRCYRVTWFTSWSPCYDCARHVADFLRGYPNLSLRIFAARLYFCEDRKAEPEGLRRLHRAGVQIAIMTFKDYFYCWNTFVENREKTFKAWEGLHENSVRLSRQLRRILLPLYEVDDLRDAFRTLGL

SEQ ID NO: 18 - protein, 199 aa, Bos taurus
  REGION 1..199: note = MISC_FEATURE - Bovine AID (btAID) polypeptide sequence
  REGION 1..30: note = MISC_FEATURE - Nuclear localization sequence
  REGION 183..199: note = MISC_FEATURE - Nuclear export signal
MDSLLKKQRQFLYQFKNVRWAKGRHETYLCYVVKRRDSPTSFSLDFGHLRNKAGCHVELLFLRYISDWDLDPGRCYRVTWFTSWSPCYDCARHVADFLRGYPNLSLRIFTARLYFCDKERKAEPEGLRRLHRAGVQIAIMTFKDYFYCWNTFVENHERTFKAWEGLHENSVRLSRQLRRILLPLYEVDDLRDAFRTLGL

SEQ ID NO: 19 - protein, 239 aa, Rattus sp.
  REGION 1..239: note = MISC_FEATURE - Rat AID polypeptide sequence
  REGION 1..26: note = MISC_FEATURE - Nuclear localization sequence
  REGION 194..239: note = MISC_FEATURE - Nuclear export signal
MAVGSKPKAALVGPHWERERIWCFLCSTGLGTQQTGQTSRWLRPAATQDPVSPPRSLLMKQRKFLYHFKNVRWAKGRHETYLCYVVKRRDSATSFSLDFGYLRNKSGCHVELLFLRYISDWDLDPGRCYRVTWFTSWSPCYDCARHVADFLRGNPNLSLRIFTARLTGWGALPAGLMSPARPSDYFYCWNTFVENHERTFKAWEGLHENSVRLSRRLRRILLPLYEVDDLRDAFRTLGL

SEQ ID NO: 20 - protein, 198 aa, Mus musculus [sequence omitted]

SEQ ID NO: 21 - protein, 229 aa, Rattus norvegicus [sequence omitted]

SEQ ID NO: 22 - protein, 229 aa, Mesocricetus auratus
  REGION 1..229: note = MISC_FEATURE - maAPOBEC-1 polypeptide sequence
MSSETGPVVVDPTLRRRIEPHEFDAFFDQGELRKETCLLYEIRWGGRHNIWRHTGQNTSRHVEINFIEKFTSERYFYPSTRCSIVWFLSWSPCGECSKAITEFLSGHPNVTLFIYAARLYHHTDQRNRQGLRDLISRGVTIRIMTEQEYCYCWRNFVNYPPSNEVYWPRYPNLWMRLYALELYCIHLGLPPCLKIKRRHQYPLTFFRLNLQSCHYQRIPPHILWATGFI

SEQ ID NO: 23 - protein, 236 aa, Pongo pygmaeus
  REGION 1..236: note = MISC_FEATURE - ppAPOBEC-1 polypeptide sequence
MTSEKGPSTGDPTLRRRIESWEFDVFYDPRELRKETCLLYEIKWGMSRKIWRSSGKNTTNHVEVNFIKKFTSERRFHSSISCSITWFLSWSPCWECSQAIREFLSQHPGVTLVIYVARLFWHMDQRNRQGLRDLVNSGVTIQIMRASEYYHCWRNFVNYPPGDEAHWPQYPPLWMMLYALELHCIILSLPPCLKISRRWQNHLAFFRLHLQNCHYQTIPPHILLATGLIHPSVTWR

SEQ ID NO: 24 - protein, 236 aa, Oryctolagus cuniculus
  REGION 1..236: note = MISC_FEATURE - ocAPOBEC1 polypeptide sequence
MASEKGPSNKDYTLRRRIEPWEFEVFFDPQELRKEACLLYEIKWGASSKTWRSSGKNTTNHVEVNFLEKLTSEGRLGPSTCCSITWFLSWSPCWECSMAIREFLSQHPGVTLIIFVARLFQHMDRRNRQGLKDLVTSGVTVRVMSVSEYCYCWENFVNYPPGKAAQWPRYPPRWMLMYALELYCIILGLPPCLKISRRHQKQLTFFSLTPQYCHYKMIPPYILLATGLLQPSVPWR

SEQ ID NO: 25 - protein, 235 aa, Monodelphis domestica
  REGION 1..235: note = MISC_FEATURE - mdAPOBEC-1 polypeptide sequence
MNSKTGPSVGDATLRRRIKPWEFVAFFNPQELRKETCLLYEIKWGNQNIWRHSNQNTSQHAEINFMEKFTAERHFNSSVRCSITWFLSWSPCWECSKAIRKFLDHYPNVTLAIFISRLYWHMDQQHRQGLKELVHSGVTIQIMSYSEYHYCWRNFVDYPQGEEDYWPKYPYLWIMLYVLELHCIILGLPPCLKISGSHSNQLALFSLDLQDCHYQKIPYNVLVATGLVQPFVTWR

SEQ ID NO: 26 - protein, 224 aa, Pongo pygmaeus
  REGION 1..224: note = MISC_FEATURE - ppAPOBEC-2 polypeptide sequence
MAQKEEAAAATEAASQNGEDLENLDDPEKLKELIELPPFEIVTGERLPANFFKFQFRNVEYSSGRNKTFLCYVVEAQGKGGQVQASRGYLEDEHAAAHAEEAFFNTILPAFDPALRYNVTWYVSSSPCAACADRIIKTLSKTKNLRLLILVGRLFMWEELEIQDALKKLKEAGCKLRIMKPQDFEYVWQNFVEQEEGESKAFQPWEDIQENFLYYEEKLADILK

SEQ ID NO: 27 - protein, 224 aa, Bos taurus
  REGION 1..224: note = MISC_FEATURE - btAPOBEC-2 polypeptide sequence
MAQKEEAAAAAEPASQNGEEVENLEDPEKLKELIELPPFEIVTGERLPAHYFKFQFRNVEYSSGRNKTFLCYVVEAQSKGGQVQASRGYLEDEHATNHAEEAFFNSIMPTFDPALRYMVTWYVSSSPCAACADRIVKTLNKTKNLRLLILVGRLFMWEEPEIQAALRKLKEAGCRLRIMKPQDFEYIWQNFVEQEEGESKAFEPWEDIQENFLYYEEKLADILK

SEQ ID NO: 28 - protein, 440 aa, Mus musculus
  REGION 1..440: note = MISC_FEATURE - mAPOBEC-3-(1) polypeptide sequence
MQPQRLGPRAGMGPFCLGCSHRKCYSPIRNLISQETFKFHFKNLGYAKGRKDTFLCYEVTRKDCDSPVSLHHGVFKNKDNIHAEICFLYWFHDKVLKVLSPREEFKITWYMSWSPCFECAEQIVRFLATHHNLSLDIFSSRLYNVQDPETQQNLCRLVQEGAQVAAMDLYEFKKCWKKFVDNGGRRFRPWKRLLTNFRYQDSKLQEILRPCYISVPSSSSSTLSNICLTKGLPETRFWVEGRRMDPLSEEEFYSQFYNQRVKHLCYYHRMKPYLCYQLEQFNGQAPLKGCLLSEKGKQHAEILFLDKIRSMELSQVTITCYLTWSPCPNCAWQLAAFKRDRPDLILHIYTSRLYFHWKRPFQKGLCSLWQSGILVDVMDLPQFTDCWTNFVNPKRPFWPWKGLEIISRRTQRRLRRIKESWGLQDLVNDFGNLQLGPPMS

SEQ ID NO: 29 - protein, 429 aa, Mus musculus
  REGION 1..429: note = MISC_FEATURE - APOBEC-3-(2) (Mouse APOBEC-3) polypeptide sequence
  REGION 71..108: note = MISC_FEATURE - Nucleic acid editing domain
  REGION 288..319: note = MISC_FEATURE - Nucleic acid editing domain
MGPFCLGCSHRKCYSPIRNLISQETFKFHFKNLGYAKGRKDTFLCYEVTRKDCDSPVSLHHGVFKNKDNIHAEICFLYWFHDKVLKVLSPREEFKITWYMSWSPCFECAEQIVRFLATHHNLSLDIFSSRLYNVQDPETQQNLCRLVQEGAQVAAMDLYEFKKCWKKFVDNGGRRFRPWKRLLTNFRYQDSKLQEILRPCYIPVPSSSSSTLSNICLTKGLPETRFCVEGRRMDPLSEEEFYSQFYNQRVKHLCYYHRMKPYLCYQLEQFNGQAPLKGCLLSEKGKQHAEILFLDKIRSMELSQVTITCYLTWSPCPNCAWQLAAFKRDRPDLILHIYTSRLYFHWKRPFQKGLCSLWQSGILVDVMDLPQFTDCWTNFVNPKRPFWPWKGLEIISRRTQRRLRRIKESWGLQDLVNDFGNLQLGPPMS

SEQ ID NO: 30 - protein, 430 aa, Rattus sp.
  REGION 1..430: note = MISC_FEATURE - APOBEC-3 polypeptide sequence
  REGION 72..109: note = MISC_FEATURE - Nucleic acid editing domain
  REGION 289..320: note = MISC_FEATURE - Nucleic acid editing domain
MGPFCLGCSHRKCYSPIRNLISQETFKFHFKNRLRYAIDRKDTFLCYEVTRKDCDSPVSLHHGVFKNKDNIHAEICFLYWFHDKVLKVLSPREEFKITWYMSWSPCFECAEQVLRFLATHHNLSLDIFSSRLYNIRDPENQQNLCRLVQEGAQVAAMDLYEFKKCWKKFVDNGGRRFRPWKKLLTNFRYQDSKLQEILRPCYIPVPSSSSSTLSNICLTKGLPETRFCVERRRVHLLSEEEFYSQFYNQRVKHLCYYHGVKPYLCYQLEQFNGQAPLKGCLLSEKGKQHAEILFLDKIRSMELSQVIITCYLTWSPCPNCAWQLAAFKRDRPDLILHIYTSRLYFHWKRPFQKGLCSLWQSGILVDVMDLPQFTDCWTNFVNPKRPFWPWKGLEIISRRTQRRLHRIKESWGLQDLVNDFGNLQLGPPMS

SEQ ID NO: 31 - protein, 199 aa, Homo sapiens
  REGION 1..199: note = MISC_FEATURE - hAPOBEC-3A polypeptide sequence
  REGION 70..106: note = MISC_FEATURE - Nucleic acid editing domain
MEASPASGPRHLMDPHIFTSNFNNGIGRHKTYLCYEVERLDNGTSVKMDQHRGFLHNQAKNLLCGFYGRHAELRFLDLVPSLQLDPAQIYRVTWFISWSPCFSWGCAGEVRAFLQENTHVRLRIFAARIYDYDPLYKEALQMLRDAGAQVSIMTYDEFKHCWDTFVDHQGCPFQPWDGLDEHSQALSGRLRAILQNQGN

SEQ ID NO: 32 - protein, 373 aa, Homo sapiens
  REGION 1..373: note = MISC_FEATURE - hAPOBEC-3F polypeptide sequence
  REGION 65..99: note = MISC_FEATURE - Nucleic acid editing domain
  REGION 248..283: note = MISC_FEATURE - Nucleic acid editing domain
MKPHFRNTVERMYRDTFSYNFYNRPILSRRNTVWLCYEVKTKGPSRPRLDAKIFRGQVYSQPEHHAEMCFLSWFCGNQLPAYKCFQITWFVSWTPCPDCVAKLAEFLAEHPNVTLTISAARLYYYWERDYRRALCRLSQAGARVKIMDDEEFAYCWENFVYSEGQPFMPWYKFDDNYAFLHRTLKEILRNPMEAMYPHIFYFHFKNLRKAYGRNESWLCFTMEVVKHHSPVSWKRGVFRNQVDPETHCHAERCFLSWFCDDILSPNTNYEVTWYTSWSPCPECAGEVAEFLARHSNVNLTIFTARLYYFWDTDYQEGLRSLSQEGASVEIMGYKDFKYCWENFVYNDDEPFKPWKGLKYNFLFLDSKLQEILE

SEQ ID NO: 33 - protein, 370 aa, Macaca mulatta
  REGION 1..370: note = MISC_FEATURE - Rhesus macaque APOBEC-3G polypeptide sequence
  REGION 1..61: note = MISC_FEATURE - Cytoplasmic localization signal
MVEPMDPRTFVSNFNNRPILSGLNTVWLCCEVKTKDPSGPPLDAKIFQGKVYSKAKYHPEMRFLRWFHKWRQLHHDQEYKVTWYVSWSPCTRCANSVATFLAKDPKVTLTIFVARLYYFWKPDYQQALRILCQKRGGPHATMKIMNYNEFQDCWNKFVDGRGKPFKPRNNLPKHYTLLQATLGELLRHLMDPGTFTSNFNNKPWVSGQHETYLCYKVERLHNDTWVPLNQHRGFLRNQAPNIHGFPKGRHAELCFLDLIPFWKLDGQQYRVTCFTSWSPCFSCAQEMAKFISNNEHVSLCIFAARIYDDQGRYQEGLRALHRDGAKIAMMNYSEFEYCWDTFVDRQGRPFQPWDGLDEHSQALSGRLRAI

SEQ ID NO: 34 - protein, 384 aa, Pan troglodytes
  REGION 1..384: note = MISC_FEATURE - Chimpanzee APOBEC-3G polypeptide sequence
  REGION 1..60: note = MISC_FEATURE - Cytoplasmic localization signal
  REGION 65..100: note = MISC_FEATURE - Nucleic acid editing domain
  REGION 257..291: note = MISC_FEATURE - Nucleic acid editing domain
MKPHFRNPVERMYQDTFSDNFYNRPILSHRNTVWLCYEVKTKGPSRPPLDAKIFRGQVYSKLKYHPEMRFFHWFSKWRKLHRDQEYEVTWYISWSPCTKCTRDVATFLAEDPKVTLTIFVARLYYFWDPDYQEALRSLCQKRDGPRATMKIMNYDEFQHCWSKFVYSQRELFEPWNNLPKYYILLHIMLGEILRHSMDPPTFTSNFNNELWVRGRHETYLCYEVERLHNDTWVLLNQRRGFLCNQAPHKHGFLEGRHAELCFLDVIPFWKLDLHQDYRVTCFTSWSPCFSCAQEMAKFISNNKHVSLCIFAARIYDDQGRCQEGLRTLAKAGAKISIMTYSEFKHCWDTFVDHQGCPFQPWDGLEEHSQALSGRLRAILQNQGN

SEQ ID NO: 35 - protein, 377 aa, Chlorocebus sabaeus
  REGION 1..377: note = MISC_FEATURE - Green monkey APOBEC-3G polypeptide sequence
  REGION 1..60: note = MISC_FEATURE - Cytoplasmic localization signal
  REGION 65..100: note = MISC_FEATURE - Nucleic acid editing domain
  REGION 257..290: note = MISC_FEATURE - Nucleic acid editing domain
MNPQIRNMVEQMEPDIFVYYFNNRPILSGRNTVWLCYEVKTKDPSGPPLDANIFQGKLYPEAKDHPEMKFLHWFRKWRQLHRDQEYEVTWYVSWSPCTRCANSVATFLAEDPKVTLTIFVARLYYFWKPDYQQALRILCQERGGPHATMKIMNYNEFQHCWNEFVDGQGKPFKPRKNLPKHYTLLHATLGELLRHVMDPGTFTSNFNNKPWVSGQRETYLCYKVERSHNDTWVLLNQHRGFLRNQAPDRHGFPKGRHAELCFLDLIPFWKLDDQQYRVTCFTSWSPCFSCAQKMAKFISNNKHVSLCIFAARIYDDQGRCQEGLRTLHRDGAKIAVMNYSEFEYCWDTFVDRQGRPFQPWDGLDEHSQALSGRLRAI

SEQ ID NO: 36 - protein, 384 aa, Homo sapiens
  REGION 1..384: note = MISC_FEATURE - Human APOBEC-3G polypeptide sequence
  REGION 1..60: note = MISC_FEATURE - Cytoplasmic localization signal
  REGION 65..100: note = MISC_FEATURE - Nucleic acid editing domain
  REGION 257..291: note = MISC_FEATURE - Nucleic acid editing domain
MKPHFRNTVERMYRDTFSYNFYNRPILSRRNTVWLCYEVKTKGPSRPPLDAKIFRGQVYSELKYHPEMRFFHWFSKWRKLHRDQEYEVTWYISWSPCTKCTRDMATFLAEDPKVTLTIFVARLYYFWDPDYQEALRSLCQKRDGPRATMKIMNYDEFQHCWSKFVYSQRELFEPWNNLPKYYILLHIMLGEILRHSMDPPTFTFNFNNEPWVRGRHETYLCYEVERMHNDTWVLLNQRRGFLCNQAPHKHGFLEGRHAELCFLDVIPFWKLDLDQDYRVTCFTSWSPCFSCAQEMAKFISKNKHVSLCIFTARIYDDQGRCQEGLRTLAEAGAKISIMTYSEFKHCWDTFVDHQGCPFQPWDGLDEHSQDLSGRLRAILQNQEN

SEQ ID NO: 37 - protein, 382 aa, Homo sapiens
  REGION 1..382: note = MISC_FEATURE - Human APOBEC-3B polypeptide sequence
  REGION 66..100: note = MISC_FEATURE - Nucleic acid editing domain
  REGION 251..289: note = MISC_FEATURE - Nucleic acid editing domain
MNPQIRNPMERMYRDTFYDNFENEPILYGRSYTWLCYEVKIKRGRSNLLWDTGVFRGQVYFKPQYHAEMCFLSWFCGNQLPAYKCFQITWFVSWTPCPDCVAKLAEFLSEHPNVTLTISAARLYYYWERDYRRALCRLSQAGARVTIMDYEEFAYCWENFVYNEGQQFMPWYKFDENYAFLHRTLKEILRYLMDPDTFTFNFNNDPLVLRRRQTYLCYEVERLDNGTWVLMDQHMGFLCNEAKNLLCGFYGRHAELRFLDLVPSLQLDPAQIYRVTWFISWSPCFSWGCAGEVRAFLQENTHVRLRIFAARIYDYDPLYKEALQMLRDAGAQVSIMTYDEFEYCWDTFVYRQGCPFQPWDGLEEHSQALSGRLRAILQNQGN

SEQ ID NO: 38 - protein, 395 aa, Rattus sp.
  REGION 1..395: note = MISC_FEATURE - Rat APOBEC-3B polypeptide sequence
MQPQGLGPNAGMGPVCLGCSHRRPYSPIRNPLKKLYQQTFYFHFKNVRYAWGRKNNFLCYEVNGMDCALPVPLRQGVFRKQGHIHAELCFIYWFHDKVLRVLSPMEEFKVTWYMSWSPCSKCAEQVARFLAAHRNLSLAIFSSRLYYYLRNPNYQQKLCRLIQEGVHVAAMDLPEFKKCWNKFVDNDGQPFRPWMRLRINFSFYDCKLQEIFSRMNLLREDVFYLQFNNSHRVKPVQNRYYRRKSYLCYQLERANGQEPLKGYLLYKKGEQHVEILFLEKMRSMELSQVRITCYLTWSPCPNCARQLAAFKKDHPDLILRIYTSRLYFWRKKFQKGLCTLWRSGIHVDVMDLPQFADCWTNFVNPQRPFRPWNELEKNSWRIQRRLRRIKESWGL

SEQ ID NO: 39 - protein, 226 aa, Bos taurus
  REGION 1..226: note = MISC_FEATURE - Bovine APOBEC-3B polypeptide sequence
DGWEVAFRSGTVLKAGVLGVSMTEGWAGSGHPGQGACVWTPGTRNTMNLLREVLFKQQFGNQPRVPAPYYRRKTYLCYQLKQRNDLTLDRGCFRNKKQRHAERFIDKINSLDLNPSQSYKIICYITWSPCPNCANELVNFITRNNHLKLEIFASRLYFHWIKSFKMGLQDLQNAGISVAVMTHTEFEDCWEQFVDNQSRPFQPWDKLEQYSASIRRRLQRILTAPI

SEQ ID NO: 40 - protein, 490 aa, Pan troglodytes
  REGION 1..490: note = MISC_FEATURE - Chimpanzee APOBEC-3B polypeptide sequence
MNPQIRNPMEWMYQRTFYYNFENEPILYGRSYTWLCYEVKIRRGHSNLLWDTGVFRGQMYSQPEHHAEMCFLSWFCGNQLSAYKCFQITWFVSWTPCPDCVAKLAKFLAEHPNVTLTISAARLYYYWERDYRRALCRLSQAGARVKIMDDEEFAYCWENFVYNEGQPFMPWYKFDDNYAFLHRTLKEIIRHLMDPDTFTFNFNNDPLVLRRHQTYLCYEVERLDNGTWVLMDQHMGFLCNEAKNLLCGFYGRHAELRFLDLVPSLQLDPAQIYRVTWFISWSPCFSWGCAGQVRAFLQENTHVRLRIFAARIYDYDPLYKEALQMLRDAGAQVSIMTYDEFEYCWDTFVYRQGCPFQPWDGLEEHSQALSGRLRAILQVRASSLCMVPHRPPPPPQSPGPCLPLCSEPPLGSLLPTGRPAPSLPFLLTASFSFPPPASLPPLPSLSLSPGHLPVPSFHSLTSCSIQPPCSSRIRETEGWASVSKEGRDLG

SEQ ID NO: 41 - protein, 190 aa, Homo sapiens
  REGION 1..190: note = MISC_FEATURE - Human APOBEC-3C polypeptide sequence
  REGION 65..100: note = MISC_FEATURE - Nucleic acid editing domain
MNPQIRNPMKAMYPGTFYFQFKNLWEANDRNETWLCFTVEGIKRRSVVSWKTGVFRNQVDSETHCHAERCFLSWFCDDILSPNTKYQVTWYTSWSPCPDCAGEVAEFLARHSNVNLTIFTARLYYFQYPCYQEGLRSLSQEGVAVEIMDYEDFKYCWENFVYNDNEPFKPWKGLKTNFRLLKRRLRESLQ

SEQ ID NO: 42 - protein, 190 aa, Gorilla sp.
  REGION 1..190: note = MISC_FEATURE - Gorilla APOBEC-3C polypeptide sequence
  REGION 65..100: note = MISC_FEATURE - Nucleic acid editing domain
MNPQIRNPMKAMYPGTFYFQFKNLWEANDRNETWLCFTVEGIKRRSVVSWKTGVFRNQVDSETHCHAERCFLSWECDDILSPNTNYQVTWYTSWSPCPECAGEVAEFLARHSNVNLTIFTARLYYFQDTDYQEGLRSLSQEGVAVKIMDYKDFKYCWENFVYNDDEPFKPWKGLKYNFRFLKRRLQEILE

SEQ ID NO: 43 - protein, 202 aa, Macaca mulatta
  REGION 1..202: note = MISC_FEATURE - Rhesus macaque APOBEC-3A polypeptide sequence
  REGION 72..103: note = MISC_FEATURE - Nucleic acid editing domain
MDGSPASRPRHLMDPNTFTFNFNNDLSVRGRHQTYLCYEVERLDNGTWVPMDERRGFLCNKAKNVPCGDYGCHVELRFLCEVPSWQLDPAQTYRVTWFISWSPCFRRGCAGQVRVFLQENKHVRLRIFAARIYDYDPLYQEALRTLRDAGAQVSIMTYEEFKHCWDTFVDRQGRPFQPWDGLDEHSQALSGRLRAILQNQGN

SEQ ID NO: 44 - protein, 185 aa, Bos taurus
  REGION 1..185: note = MISC_FEATURE - Bovine APOBEC-3A polypeptide sequence
  REGION 56..86: note = MISC_FEATURE - Nucleic acid editing domain
MDEYTFTENFNNQGWPSKTYLCYEMERLDGDATIPLDEYKGFVRNKGLDQPEKPCHAELYFLGKIHSWNLDRNQHYRLTCFISWSPCYDCAQKLTTFLKENHHISLHILASRIYTHNRFGCHQSGLCELQAAGARITIMTFEDFKHCWETFVDHKGKPFQPWEGLNVKSQALCTELQAILKTQQN

SEQ ID NO: 45 - protein, 200 aa, Homo sapiens
  REGION 1..200: note = MISC_FEATURE - Human APOBEC-3H polypeptide sequence
  REGION 54..88: note = MISC_FEATURE - Nucleic acid editing domain
MALLTAETFRLQFNNKRRLRRPYYPRKALLCYQLTPQNGSTPTRGYFENKKKCHAEICFINEIKSMGLDETQCYQVTCYLTWSPCSSCAWELVDFIKAHDHLNLGIFASRLYYHWCKPQQKGLRLLCGSQVPVEVMGFPKFADCWENFVDHEKPLSFNPYKMLEELDKNSRAIKRRLERIKIPGVRAQGRYMDILCDAEV

SEQ ID NO: 46 - protein, 210 aa, Macaca mulatta
  REGION 1..210: note = MISC_FEATURE - Rhesus macaque APOBEC-3H polypeptide sequence
MALLTAKTFSLQFNNKRRVNKPYYPRKALLCYQLTPQNGSTPTRGHLKNKKKDHAEIRFINKIKSMGLDETQCYQVTCYLTWSPCPSCAGELVDFIKAHRHLNLRIFASRLYYHWRPNYQEGLLLLCGSQVPVEVMGLPEFTDCWENFVDHKEPPSFNPSEKLEELDKNSQAIKRRLERIKSRSVDVLENGLRSLQLGPVTPSSSIRNSR

SEQ ID NO: 47 - protein, 386 aa, Homo sapiens
  REGION 1..386: note = MISC_FEATURE - Human APOBEC-3D polypeptide sequence
  REGION 78..109: note = MISC_FEATURE - Nucleic acid editing domain
  REGION 262..296: note = MISC_FEATURE - Nucleic acid editing domain
MNPQIRNPMERMYRDTFYDNFENEPILYGRSYTWLCYEVKIKRGRSNLLWDTGVFRGPVLPKRQSNHRQEVYFRFENHAEMCFLSWFCGNRLPANRRFQITWFVSWNPCLPCVVKVTKFLAEHPNVTLTISAARLYYYRDRDWRWVLLRLHKAGARVKIMDYEDFAYCWENFVCNEGQPFMPWYKFDDNYASLHRTLKEILRNPMEAMYPHIFYFHFKNLLKACGRNESWLCFTMEVTKHHSAVFRKRGVFRNQVDPETHCHAERCFLSWFCDDILSPNTNYEVTWYTSWSPCPECAGEVAEFLARHSNVNLTIFTARLCYFWDTDYQEGLCSLSQEGASVKIMGYKDFVSCWKNFVYSDDEPFKPWKGLQTNFRLLKRRLREILQ

SEQ ID NO: 48 - protein, 236 aa, Homo sapiens
  REGION 1..236: note = MISC_FEATURE - Human APOBEC-1 polypeptide sequence
MTSEKGPSTGDPTLRRRIEPWEFDVFYDPRELRKEACLLYEIKWGMSRKIWRSSGKNTTNHVEVNFIKKFTSERDFHPSMSCSITWFLSWSPCWECSQAIREFLSRHPGVTLVIYVARLFWHMDQQNRQGLRDLVNSGVTIQIMRASEYYHCWRNFVNYPPGDEAHWPQYPPLWMMLYALELHCIILSLPPCLKISRRWQNHLTFFRLHLQNCHYQTIPPHILLATGLIHPSVAWR

SEQ ID NO: 49 - protein, 229 aa, Mus musculus
  REGION 1..229: note = MISC_FEATURE - Mouse APOBEC-1 polypeptide sequence
MSSETGPVAVDPTLRRRIEPHEFEVFFDPRELRKETCLLYEINWGGRHSVWRHTSQNTSNHVEVNFLEKFTTERYFRPNTRCSITWFLSWSPCGECSRAITEFLSRHPYVTLFIYIARLYHHTDQRNRQGLRDLISSGVTIQIMTEQEYCYCWRNFVNYPPSNEAYWPRYPHLWVKLYVLELYCIILGLPPCLKILRRKQPQLTFFTITLQTCHYQRIPPHLLWATGLK

SEQ ID NO: 50 - protein, 224 aa, Homo sapiens
  REGION 1..224: note = MISC_FEATURE - Human APOBEC-2 polypeptide sequence
MAQKEEAAVATEAASQNGEDLENLDDPEKLKELIELPPFEIVTGERLPANFFKFQFRNVEYSSGRNKTFLCYVVEAQGKGGQVQASRGYLEDEHAAAHAEEAFFNTILPAFDPALRYNVTWYVSSSPCAACADRIIKTLSKTKNLRLLILVGRLFMWEEPEIQAALKKLKEAGCKLRIMKPQDFEYVWQNFVEQEEGESKAFQPWEDIQENFLYYEEKLADILK

SEQ ID NO: 51 - protein, 224 aa, Mus musculus
  REGION 1..224: note = MISC_FEATURE - Mouse APOBEC-2 polypeptide sequence
MAQKEEAAEAAAPASQNGDDLENLEDPEKLKELIDLPPFEIVTGVRLPVNFFKFQFRNVEYSSGRNKTFLCYVVEVQSKGGQAQATQGYLEDEHAGAHAEEAFFNTILPAFDPALKYNVTWYVSSSPCAACADRILKTLSKTKNLRLLILVSRLFMWEEPEVQAALKKLKEAGCKLRIMKPQDFEYIWQNFVEQEEGESKAFEPWEDIQENFLYYEEKLADILK

SEQ ID NO: 52 - protein, 224 aa, Rattus sp.
  REGION 1..224: note = MISC_FEATURE - Rat APOBEC-2 polypeptide sequence
MAQKEEAAEAAAPASQNGDDLENLEDPEKLKELIDLPPFEIVTGVRLPVNFFKFQFRNVEYSSGRNKTFLCYVVEAQSKGGQVQATQGYLEDEHAGAHAEEAFFNTILPAFDPALKYNVTWYVSSSPCAACADRILKTLSKTKNLRLLILVSRLFMWEEPEVQAALKKLKEAGCKLRIMKPQDFEYLWQNFVEQEEGESKAFEPWEDIQENFLYYEEKLADILK

SEQ ID NO: 53 - protein, 208 aa, Petromyzon marinus
  REGION 1..208: note = MISC_FEATURE - Petromyzon marinus CDA1 (pmCDAl) polypeptide sequence
MTDAEYVRIHEKLDIYTFKKQFFNNKKSVSHRCYVLFELKRRGERRACFWGYAVNKPQSGTERGIHAEIFSIRKVEEYLRDNPGQFTINWYSSWSPCADCAEKILEWYNQELRGNGHTLKIWACKLYYEKNARNQIGLWNLRDNGVGLNVMVSEHYQCCRKIFIQSSHNQLNENRWLEKTLKRAEKRRSELSFMIQVKILHTTKSPAV

SEQ ID NO: 54 - protein, 381 aa, Homo sapiens
  REGION 1..381: note = MISC_FEATURE - Human APOBEC3G D316R D317R polypeptide sequence
MKPHFRNTVERMYRDTFSYNFYNRPILSRRNTVWLCYEVKTKGPSRPPLDAKIFRGQVYSELKYHPEMRFFHWFSKWRKLHRDQEYEVTWYISWSPCTKCTRDMATFLAEDPKVTLTIFVARLYYFWDPDYQEALRSLCQKRDGPRATMKFNYDEFQHCWSKFVYSQRELFEPWNNLPKYYILLHFMLGEILRHSMDPPTFTFNFNNEPWVRGRHETYLCYEVERMHNDTWVLLNQRRGFLCNQAPHKHGFLEGRHAELCFLDVIPFWKLDLDQDYRVTCFTSWSPCFSCAQEMAKFISKKHVSLCIFTARIYRRQGRCQEGLRTLAEAGAKISFTYSEFKHCWDTFVDHQGCPFQPWDGLDEHSQDLSGRLRAILQNQEN

SEQ ID NO: 55 - protein, 182 aa, Homo sapiens
  REGION 1..182: note = MISC_FEATURE - Human APOBEC3G chain A polypeptide sequence
MDPPTFTFNFNNEPWWGRHETYLCYEVERMHNDTWVLLNQRRGFLCNQAPHKHGFLEGRHAELCFLDVIPFWKLDLDQDYRVTCFTSWSPCFSCAQEMAKFISKNKHVSLCIFTARIYDDQGRCQEGLRTLAEAGAKISFTYSEFKHCWDTFVDHQGCPFQPWDGLDEHSQDLSGRLRAILQ

SEQ ID NO: 56 - protein, 184 aa, Homo sapiens
  REGION 1..184: note = MISC_FEATURE - Human APOBEC3G chain A D120R D121R polypeptide sequence
MDPPTFTFNFNNEPWVRGRHETYLCYEVERMHNDTWVLLNQRRGFLCNQAPHKHGFLEGRHAELCFLDVIPFWKLDLDQDYRVTCFTSWSPCFSCAQEMAKFISKNKHVSLCIFTARIYRRQGRCQEGLRTLAEAGAKISFMTYSEFKHCWDTFVDHQGCPFQPWDGLDEHSQDLSGRLRAILQ

SEQ ID NO: 57 - protein, 367 aa, Homo sapiens
  REGION 1..367: note = MISC_FEATURE - hAPOBEC-4 polypeptide sequence
MEPIYEEYLANHGTIVKPYYWLSFSLDCSNCPYHIRTGEEARVSLTEFCQIFGFPYGTTFPQTKHLTFYELKTSSGSLVQKGHASSCTGNYIHPESMLFEMNGYLDSAIYNNDSIRHIILYSNNSPCNEANHCCISKMYNFLITYPGITLSIYFSQLYHTEMDFPASAWNREALRSLASLWPRVVLSPISGGIWHSVLHSFISGVSGSHVFQPILTGRALADRHNAYEINAITGVKPYFTDVLLQTKRNPNTKAQEALESYPLNNAFPGQFFQMPSGQLQPNLPPDLRAPVVFVLVPLRDLPPMHMGQNPNKPRNIVRHLNMPQMSFQETKDLGRLPTGRSVEIVEITEQFASSKEADEKKKKKGKK

SEQ ID NO: 58 - protein, 388 aa, Rattus norvegicus
  REGION 1..388: note = MISC_FEATURE - rAPOBEC-4 polypeptide sequence
MEPLYEEYLTHSGTIVKPYYWLSVSLNCTNCPYHIRTGEEARVPYTEFHQTFGFPWSTYPQTKHLTFYELRSSSGNLIQKGLASNCTGSHTHPESMLFERDGYLDSLIFHDSNIRHIILYSNNSPCDEANHCCISKMYNFLMNYPEVTLSVFFSQLYHTENQFPTSAWNREALRGLASLWPQVTLSAISGGIWQSILETFVSGISEGLTAVRPFTAGRTLTDRYNAYEINCITEVKPYFTDALHSWQKENQDQKVWAASENQPLHNTTPAQWQPDMSQDCRTPAVFMLVPYRDLPPIHVNPSPQKPRTVVRHLNTLQLSASKVKALRKSPSGRPVKKEEARKGSTRSQEANETNKSKWKKQTLFIKSNICHLLEREQKKIGILSSWSV

SEQ ID NO: 59 - protein, 363 aa, Macaca fascicularis
  REGION 1..363: note = MISC_FEATURE - mfAPOBEC-4 polypeptide sequence
MEPTYEEYLANHGTIVKPYYWLSFSLDCSNCPYHIRTGEEARVSLTEFCQIFGFPYGTTYPQTKHLTFYELKTSSGSLVQKGHASSCTGNYIHPESMLFEMNGYLDSAIYNNDSIRHIILYCNNSPCNEANHCCISKVYNFLITYPGITLSIYFSQLYHTEMDFPASAWNREALRSLASLWPRVVLSPISGGIWHSVLHSFVSGVSGSHVFQPILTGRALTDRYNAYEINAITGVKPFFTDVLLHTKRNPNTKAQMALESYPLNNAFPGQSFQMTSGIPPDLRAPVVFVLLPLRDLPPMHMGQDPNKPRNIIRHLNMPQMSFQETKDLERLPTRRSVETVEITERFASSKQAEEKTKKKKGKK

SEQ ID NO: 60 - protein, 218 aa, Rattus norvegicus
  REGION 1..218: note = MISC_FEATURE - rAPOBEC-1 (delta 177-186) polypeptide sequence
MSSETGPVAVDPTLRRRIEPHEFEVFFDPRELRKETCLLYEINWGGRHSIWRHTSQNTNKHVEVNFIEKFTTERYFCPNTRCSITWFLSWSPCGECSRAITEFLSRYPHVTLFIYIARLYHHADPRNRQGLRDLISSGVTIQIMTEQESGYCWRNFVNYSPSNEAHWPRYPHLWVRGLPPCLNILRRKQPQLTFFTIALQSCHYQRLPPHILWATGLK

SEQ ID NO: 61 - protein, 218 aa, Rattus norvegicus
  REGION 1..218: note = MISC_FEATURE - rAPOBEC-1 (delta 202-213) polypeptide sequence
MSSETGPVAVDPTLRRRIEPHEFEVFFDPRELRKETCLLYEINWGGRHSIWRHTSQNTNKHVEVNFIEKFTTERYFCPNTRCSITWFLSWSPCGECSRAITEFLSRYPHVTLFIYIARLYHHADPRNRQGLRDLISSGVTIQIMTEQESGYCWRNFVNYSPSNEAHWPRYPHLWVRLYVLELYCIILGLPPCLNILRRKQPQHYQRLPPHILWATGLK

SEQ ID NO: 62 - protein, 198 aa, Mus musculus
  REGION 1..198: note = MISC_FEATURE - mouse cytidine deaminase polypeptide sequence
  REGION 1..30: note = MISC_FEATURE - Nuclear localization sequence
  REGION 183..198: note = MISC_FEATURE - Nuclear export signal
MDSLLMKQKKFLYHFKNVRWAKGRHETYLCYVVKRRDSATSCSLDFGHLRNKSGCHVELLFLRYISDWDLDPGRCYRVTWFTSWSPCYDCARHVAEFLRWNPNLSLRIFTARLYFCEDRKAEPEGLRRLHRAGVQIGIMTFKDYFYCWNTFVENRERTFKAWEGLHENSVRLTRQLRRILLPLYEVDDLRDAFRMLGF

SEQ ID NO: 63 - protein, 224 aa, Petromyzon marinus
  REGION 1..224: note = MISC_FEATURE - pmCDA-1 polypeptide sequence
MAGYECVRVSEKLDFDTFEFQFENLHYATERHRTYVIFDVKPQSAGGRSRRLWGYIINNPNVCHAELILMSMIDRHLESNPGVYAMTWYMSWSPCANCSSKLNPWLKNLLEEQGHTLTMHFSRIYDRDREGDHRGLRGLKHVSNSFRMGVVGRAEVKECLAEYVEASRRTLTWLDTTESMAAKMRRKLFCILVRCAGMRESGIPLHLFTLQTPLLSGRVVWWRV

SEQ ID NO: 64 - protein, 331 aa, Petromyzon marinus
  REGION 1..331: note = MISC_FEATURE - pmCDA-2 polypeptide sequence
MELREVVDCALASCVRHEPLSRVAFLRCFAAPSQKPRGTVILFYVEGAGRGVTGGHAVNYNKQGTSIHAEVLLLSAVRAALLRRRRCEDGEEATRGCTLHCYSTYSPCRDCVEYIQEFGASTGVRVVIHCCRLYELDVNRRRSEAEGVLRSLSRLGRDFRLMGPRDAIALLLGGRLANTADGESGASGNAWVTETNVVEPLVDMTGFGDEDLHAQVQRNKQIREAYANYASAVSLMLGELHVDPDKFPFLAEFLAQTSVEPSGTPRETRGRPRGASSRGPEIGRQRPADFERALGAYGLFLHPRIVSREADREEIKRDLIVVMRKHNYQGP

SEQ ID NO: 65 - protein, 209 aa, Petromyzon marinus
  REGION 1..209: note = MISC_FEATURE - pmCDA-5 polypeptide sequence
MAGDENVRVSEKLDFDTFEFQFENLHYATERHRTYVIFDVKPQSAGGRSRRLWGYIINNPNVCHAELILMSMIDRHLESNPGVYAMTWYMSWSPCANCSSKLNPWLKNLLEEQGHTLMMHFSRIYDRDREGDHRGLRGLKHVSNSFRMGVVGRAEVKECLAEYVEASRRTLTWLDTTESMAAKMRRKLFCILVRCAGMRESGMPLHLFT

SEQ ID NO: 66 - protein, 158 aa, Saccharomyces cerevisiae
  REGION 1..158: note = MISC_FEATURE - yCD polypeptide sequence
MVTGGMASKWDQKGMDIAYEEAALGYKEGGVPIGGCLINNKDGSVLGRGHNMRFQKGSATLHGEISTLENCGRLEGKVYKDTTLYTTLSPCDMCTGAIIMYGIPRCVVGENVNFKSKGEKYLQTRGHEVVVVDDERCKKIMKQFIDERPQDWFEDIGE

SEQ ID NO: 67 - protein, 194 aa, synthetic construct
  REGION 1..194: note = cytidine deaminase polypeptide sequence
MKPQIRDHRPNPMEAMYPHIFYFHFENLEKAYGRNETWLCFTVEIIKQYLPVPWKKGVFRNQVDPETHCHAEKCFLSWFCNNTLSPKKNYQVTWYTSWSPCPECAGEVAEFLAEHSNVKLTIYTARLYYFWDTDYQEGLRSLSEEGASVEIMDYEDFQYCWENFVYDDGEPFKRWKGLKYNFQSLTRRLREILQ

SEQ ID NO: 68 - protein, 192 aa, synthetic construct
  REGION 1..192: note = cytidine deaminase polypeptide sequence
MADSSEKMRGQYISRDTFEKNYKPIDGTKEAHLLCEIKWGKYGKPWLHWCQNQRMNIHAEDYFMNNIFKAKKHPVHCYVTWYLSWSPCADCASKIVKFLEERPYLKLTIYVAQLYYHTEEENRKGLRLLRSKKVIIRVMDISDYNYCWKVFVSNQNGNEDYWPLQFDPWVKENYSRLLDIFWESKCRSPNPW

SEQ ID NO: 69 - protein, 280 aa, synthetic construct
  REGION 1..280: note = cytidine deaminase polypeptide sequence
MDPQRLRQWPGPGPASRGGYGQRPRIRNPEEWFHELSPRTFSFHFRNLRFASGRNRSYICCQVEGKNCFFQGIFQNQVPPDPPCHAELCFLSWFQSWGLSPDEHYYVTWFISWSPCCECAAKVAQFLEENRNVSLSLSAARLYYFWKSESREGLRRLSDLGAQVGIMSFQDFQHCWNNFVHNLGMPFQPWKKLHKNYQRLVTELKQILREEPATYGSPQAQGKVRIGSTAAGLRHSHSHTRSEAHLRPNHSSRQHRILNPPREARARTCVLVDASWICYR

SEQ ID NO: 70 - protein, 555 aa, synthetic construct
  REGION 1..555: note = pYY-BEM3.1; tr|F7B644|F7B644_HORSE polypeptide sequence
MPRGRARERQRRNPMEKLDAEAFSFHFLNMEFVYDRNCSYLCYQVEGRLSGSPVLSEQGVFPNEVCGKTRRHAELCFLDWFRGRLSPDEYYCVTWFISWSPCSNCAREVAEFLKRHRNVELSIFAARLYYCRDHEQGLQSLCNRGAQLAVMLRKDFTYCWDNFVHNSGREFSPWENIDANSDLLARKLEDLLKNPMEKLHRKTFSFHFRNLKFAKGRKCSYLCYRVEGRLSGSPGLSEQGVFLNEVCDENCRHAELCFLHWFRGRLSPHADYRVTWFISWSPCSNCAREVAEFLKQHRNVELHISAARLYYWQRNKPGLRNLRSSGAQLAIMFFWDFRDCWDNFVHNSGRHFIPWKKINVNSRLLATKLEDLLKNPLEKLHPNTFSFHFCNLEFAYDRKYSYLCYQVEGRLSGSPGLSEQGVFLNEVCGKTRCHAELCFLDWFRVRLSPDEYYRVTWFISWSPCFYCAREVADFLKQYRNVKLSIFAARLYYCRDHAQGLRSLCSSGAQLAIMFFWDFRYCWDNFVHNSGREFRPWKKINVNSRLLATKLEDILK

SEQ ID NO: 71 - protein, 437 aa, synthetic construct
  REGION 1..437: note = pYY-BEM3.2; tr|D1LZA1|D1LZA1_PANTI polypeptide sequence
MEPWRPSPRNPMDRIDPKTFRFQFPNLRYASGRKLCYLCFQVERDYFYYNDSDWGVFRNEVHPWAPCHAEQCFLSWFRDQYPYRDEDYNVTWFLSWSPCPTCAEEVVEFLEEYRNLTLSIFTSRLYYFWHPNYQEGLCKLWDAGVQLDIMSCDEFEYCWDNFVYHKGMRFQRRNLLKDYDFLAAKLQEILSPGQQRKRDWPFPPRPGAQVDPRSWVQEVTEPGINTRRHPLHLLVSFLLPRPTMNPLQEDIFYRQFGNQHRVPKPYYYRRKTYLCYQLKLPEGTLIDKDCLRNKKKRHAEICFIDKIKSLTRDTSQRFEIICYITWSPCPFCAEELVAFVKDNPHLSLRIFASRLYVHWRWKYQQGLRHLHASGIPVAVMSLPEFEDCWRNFVDHQDRLFQPWRNLDQYSESIKRRLGKILTPLNDLRNDFRNLKLE

SEQ ID NO: 72 - protein, 440 aa, synthetic construct
  REGION 1..440: note = pYY-BEM3.3; tr|A0A3Q0DM17|A0A3Q0DM17_TARSY polypeptide sequence
MPMKRMYSNIYFDHFNNQRLLSGQNAPWLCFKVERVENCMLVPLETGVFGNQVSGCCGKTERPVEPTSLTRSVLVSPNPGTELRAQQPSRKGHLGKLGCVEYPSPGLALVMLGYGASTYCPDSSMYCPETCHHPEMCFLYWFEKTLSHEEQYQITWYVSWSPCVNCAEEVAEFLSVHPKVNLTIYAARLYCYQKLNHRQGLRRLCKEGACVKIMNYEEFDHCWENFVYNNYKSFKPWVKLQDNYELLATELDKILRIPMERMPQKKFRFHFQNLIAKDRNTTWLCFEVKNVRKKHPPDLLERGIFQNQVTPRINCHAEMCFLSWFLENMLLHGKRYQVTWYISWSPCSICAEEVAEFLSAHPKVSLTIYAARLYYFWVPGYRQGLRRLVEEGARVEIMNYEEFDYCWENFVSINNEPFQPWEGLHEKYGYLVTKLNNILG

SEQ ID NO: 73 - protein, 453 aa, synthetic construct
  REGION 1..453: note = pYY-BEM3.4; tr|A0A3Q0DNJ5|A0A3Q0DNJ5_TARSY polypeptide sequence
MEDNPEPRPRQQMDQDTFIFNFNNDPSVRGRHQTFLCYEVEHLDDDTWVPQDKYLGFLHNQPQSRSNAYCAYHAELCFLELVSSWQLDPAQRYRVTCFISWSPCSSCAQEVAAFLKKNRHVTLRILAARIYDYYQGYEDGLRTLQGVGVDITVMTSAEFGHCWNTFVDHQGSPFQPWEGLDQHSQVIWQRMQDILQVIPAKYLMEKVKYTVTVDILFKGRVPGPRYLMDQNTFTRNFINNLSVSGRRQTLLCYEVERLGGDIWVPLDQLRGFLLSQARDVLNYYQGRHAEPCFLDLVSSWQLDPAQHYRVTWFISWSPCTSCAQAVAAFLRENRHVTLRILAARIYDYHQGYEEGLRTLQRTGAHIDIMTFKEFGHCWNTFVNHKGSPFKSWTGLDQHSQALRKRLQDILHTMASSLWDQSEPKKPIPSQEVTLPESIPPSHGNRFRLVKRPS

SEQ ID NO: 74 - protein, 424 aa, synthetic construct
  REGION 1..424: note = pYY-BEM3.5; tr|G5AYU5|G5AYU5_HETGA polypeptide sequence
FCFLSCVHRKPIERIYKKAFRFYFRNLRCAYGRNKTFLCYEVKRERDNKVLHKGVVLNQVEPYMPLHAELRFLSWFHDTLLCPLGSYQVTLYVSWSPCSECAEELTTFLAGHRNVTMTIYVAQLYYCNWKSPNREGLKILIAEDARLRVMFYDEFLYCWRNFVKNDYNNFDPWSLLDENSRYHNRILQNILKGWGRPHRVGPEGEQTATPGGSGGHCISVFSLLRRREMTLKEETFRVQFNNAYKAPKPYRRRVTYLCYQLQEANGDPLTKGCLRTKKGYHAESRFIKRICSMDLGQDQSYQVTCFLTWSPCPHCAQELVSFKRAHPHLRLQIFTARLFFHWKRSYQEGLQRLCRAQVPVAVMGHPEFAYCWDNFVDHQPGPFEPPWAKLEYYSSCLKRRLQQILRSWGVDDLTNDFRNLQLGP

SEQ ID NO: 75 - protein, 385 aa, synthetic construct
  REGION 1..385: note = pYY-BEM3.6; tr|A0A2Y9QMV5|A0A2Y9QMV5_TRIMA polypeptide sequence
MLSSPQTPGTRKPMKTLAPDEFSFNFENLRLAHGRNTTFLCFQVETKAPPSLNSPDSGIFQNQDHCPSHHHAEMVFLTWFQKRLSPAQHYEVTWYMSWSPCSRCAVQVAKFLKSNSTVNLSIFVARLYYPRELETKDGLHSLWQAGAQVQIMFFQDFKYCWENFVNNEGKPFQPWKNLDENSKDWDTELKDIHRNTTDLLTEEMFYSQFYNREKKSSIPRKTYLCYQLNEPQPVKRCLHYKKGYHAVTRFIDGIVSMNLDPARSYDITCYFTWSPCNRYARKLVSFIEDYPNLRLKVYTSRLYFHWCWTNMQGLQHLQNSRVTVAVMTFRDFEYCWKNFVDNQGKPFEPWEKLDLYSQSTERRLRRILKPLTPDVLNEDFGNLHL

SEQ ID NO: 76 - protein, 381 aa, synthetic construct
  REGION 1..381: note = pYY-BEM3.7; tr|H0XHI0|H0XHI0_OTOGA polypeptide sequence
LSCAFRDPMNRMYPKTFCQNFEKEPCPSNQNSSWLCFEVETKNSAVFFHRGVFRNQPAPPPRAPTSVLLSQGPVKTPCHAEECFLTWIQGVLPPDHHYHVTWYVSRGPCANCANLIVHFLAMHRRVTLTIFAAHLNFFWESDFQQGLLRMDQEGVQLHIMGYEEFEYCWDNFVYNQRKQFVPWNGLNENYEFMVSTLEDILRSPLDRIRQKDFSIHFRNSLWLDDKSTWLCFEVKRTKSPVPLYRGVFRNQSPPKTPCHAEVRFFTWLQDLPPDFCCQFTWYLSWSPCADCADLVANFLAKHRNVSLTIFVARLYYYRDPEMHRGLRRMYQEGANVDIMSVIEFEYCWDNFVYNQGKQFVPWNGLNENYEFLVPRLQEILE

SEQ ID NO: 77 - protein, 337 aa, synthetic construct
  REGION 1..337: note = pYY-BEM3.8; tr|A0A3M0K4Y7|A0A3M0K4Y7_HIRRU polypeptide sequence
MYISKKALRRHFDPRVYPRETYLLCELQWEGSRRVWIHWIRNVPDHHAEEYFLEEVFEPRNYGFCNITLYLSWSPCCTCCSKIRDFLKRNPNVKIDIRVARLIYPDYAETRSSLRELNGLQRVSIQVMEAAGLSCIESKNHRISQVERDPKGSSSPTLFTLQDHLKLSNMTESVIQDSVSIQICYQMRILGFQCHIRWKLQPEDFQRNYSPNQIGRVVYLLYEVRWRRGSIWRNWCSNNPEQHAEVNFLENHFHHRPQTPCSITWFLSTSPCGKCSRRILEFLKSQPNVTLEIYAAKLFRHHDIRNRQGLRNLMMNGVTIYIMNLEGNPASLCLSVD

SEQ ID NO: 78 - protein, 237 aa, synthetic construct
  REGION 1..237: note = pYY-BEM3.9; tr|A0A3P4LUZ8|A0A3P4LUZ8_GULGU polypeptide sequence
MSFEDYEYCWETFVDHKGMYFQSWDLLRDNDLLAAELKNILRSTMNPLRQEIFYHQFGNQPRAPRPYHRRKTYLCYQLQPHEGPITARVCLQNKKKRHAEIRFIDNIRALRLDRSQTFEITCYLTWSPCPTCAKALAVFVQDHPHISLRLFASRLFIHWCWKYQEGLRLLHRSRIPVAVMRLQEFEDCWRNFVDNQDEPFQPWNKLEQYSESITRRLRRILGHPQNNLENDFRNLHI

SEQ ID NO: 79 - protein, 221 aa, synthetic construct
  REGION 1..221: note = pYY-BEM3.10; tr|G5BPM8|G5BPM8_HETGA polypeptide sequence
RRRIEPWQFEASFDPRQLRRETCLLSEVRWGTSPRAWRGCSLNTARHAEVSFMDRLTSEGRLRGPVRCSITWFLSWSPCGACAQAIGEFLRQHPNVSLVIYIARLFWHVDEQNRQGLRDLVTRGVRMQVMSDPEFAHCWRNFVNYSPGQEARWPQVPPVWTWLYSLELHCILLNLPPCLKISRRHHNQLTFFQLILQNCHYQAIPSPVLLASGLIHPFVTW

SEQ ID NO: 80 - protein, 211 aa, synthetic construct
  REGION 1..211: note = pYY-BEM3.11; tr|H2M862|H2M862_ORYLA polypeptide sequence
MITKLDSVLLPKKKFIYHYKNMRWARGRHETYLCFVVKRRVGPESLSFDFGHLRNRNGCHVELLFLRHLSALCPGLWGYGATGQGRVSYSITWFCSWSPCANCSFRLAQFLSQTPNLRLRIFVSRLYFCDLEDSREREGLRMLKKVGVHITVMSYKDYFYCWQTFVARKQSKFKPWDGLHQNSVRLSRKLNRILQPCETEDFRDAFKLLGL

SEQ ID NO: 81 - protein, 353 aa, synthetic construct
  REGION 1..353: note = pYY-BEM3.12; tr|H0Y0C6|H0Y0C6_OTOGA polypeptide sequence
MYLKTFYRHFNNRPYLSRRNDTWLCFEVKTTSSNSPGSFYSGVFRNQGPRYCPWHTELCFLTWVRPIVSHHHFYQITWYMSWSPCANCAWQVATFLATHENVSLTNYTVRIYYFWRQDYRQGLLRMIEEGTQVYVMSSKEFQHCWENFVDHWGTRWVTCWNRLKKNYEFLVTRLSEILSDPKERISPNTFYNQFNNTPVPRGRKDTWLCFEVKEKNSNSPGSFHRGVFQNQVFSGTSSHARRCPPDHHYEVTWYTSWSPCAHCAWHVVNFLTSNPNVSLTIFAARLYYIYRPEIQQGLRRVFQEGAKVHIMSLKEFKYCWAKLVYNSGMRFMPWYQFNFNFLFPNTTLKGDLH

SEQ ID NO: 82 - protein, 189 aa, synthetic construct
  REGION 1..189: note = pYY-BEM3.13; tr|A0A3Q2Z5X6|A0A3Q2Z5X6_HIPCM polypeptide sequence
MDVHFMNFIYHYKNMRWAKGRNETYLCFVVKRRVGPNSLTFDFGHLRNRNGCHVELLFLRYLGRRLSYSITWFCSWSPCANCSAALSQFLSRMPNLRLRIFVARLYFCDMEDSHEREGLRLLQKAGVQVTVMSYKDYYYCWQTFVDRKKSHFKAWEDLHQNSVRLSRKLNRILQPCEMDLRDAFKLLGL

SEQ ID NO: 83 - protein, 190 aa, synthetic construct
  REGION 1..190: note = pYY-BEM3.15; tr|A0A2K6NY90|A0A2K6NY90_RHIRO polypeptide sequence
MNPHIRNPMEAMYPGTFYFHFKNLWEADNRNESWLCFAVEVIKHHSTVSWKRGVFRNQVDPETHCHAEKCFLSWFCDNTLSPKKNYQVTWYTSWSPCPECAREVAKFLARHSNVMLTIYTARLYYSQYPNYQEGLRRLNEEGVPVEIMDYEDFKYCWENFVYNGDELFKPWKGLKYNFLFLDSKLQEILE

SEQ ID NO: 84 - protein, 202 aa, synthetic construct
  REGION 1..202: note = pYY-BEM3.16; tr|Q6ICH2|Q6ICH2_HUMAN polypeptide sequence
MNPQIRNPMERMYRDTFYDNFENEPILYGRSYTWLCYEVKIKRGRSNLLWDTGVFRGPVLPKRQSNHRQEVDPETHCHAERCFLSWFCDDILSPNTNYEVTWYTSWSPCPECAGEVAEFLARHSNVNLTIFTARLCYFWDTDYQEGLCSLSQEGASVKIMGYKDFVSCWKNFVYSDDEPFKPWKGLQTNFRLLKRRLREILQ

SEQ ID NO: 85 - protein, 202 aa, synthetic construct
  REGION 1..202: note = pYY-BEM3.17; tr|G8GPV1|G8GPV1_CERNE polypeptide sequence
MDGSPASRPGHVMDPGTFTSNFNNKPWVSGQRETYLCYKVERSHNDTWVLLNQHRGFLRNQAKNRLHGDYGCHAELCFLGEVPSWRLDPTQTYRVTWFISWSPCFSGGCAEQVRAFLQENTHVRLRIFAARIYDYDFLYQEALRTLRDAGAQVSIMTYEEFKHCWDTFVDHQGRPFQPWDGLDEHSQALSGRLQAILQNQGN

SEQ ID NO: 86 - protein, 181 aa, synthetic construct
  REGION 1..181: note = pYY-BEM3.18; tr|Q1WBT6|Q1WBT6_SYMSY polypeptide sequence
MALLTAKTFRLQFNNKRRVTKPYYPRKALLCYQLTPQNGSTPTRGYFKNKKKRHAEIRFINKIKSMGLDETQCYQVTCYLTWSPCPSCAWELVDFIKAHDHLNLGIFASRLYYHWCRHQQEGLRLLCGSQVPVEVMGFPEFADCWENFVDHEEPLSFNPSEMLEELDKNSRAIKRRLEKIK

SEQ ID NO: 87 - protein, 211 aa, synthetic construct
  REGION 1..211: note = pYY-BEM3.19; tr|A0A3B4CS14|A0A3B4CS14_PYGNA polypeptide sequence
MDNTNRRKFIYHYKNVRWARGRHETYLCFVVKKRNSPDSLSFDFGHLRNRNGCHVELLFLRYIEVLCPGLWGSGVDGVRVSYAVTWFCSWSPCSNCAQRLTNFLSQTPNLRLRIFVARLYFCDEEDSLEREGLRHLQRAGVQITVMTYKDFFYCWQTFVASRERCFKAWEGLRQNSVRLSRKLNRILQVFISTPVISPLITTHLGQSWAGG

SEQ ID NO: 88 - protein, 315 aa, synthetic construct
  REGION 1..315: note = pYY-BEM3.20; tr|A0A087XZI4|A0A087XZI4_POEFO polypeptide sequence
RKVSYSVTWFCSWSPCANCSIRLAQFLHQTPNLRLRIFVSRLYFCDLEDSREREGLRILKKAGVHITVMSYKDYFYCWQTFVAKSQSKFKPWDGLHQNYIRLSRKLNRILQPALDIKKFIYHYKNLRWARGRCETYLCFVVKKKLHLFMFVIVGRNRLFDLNVTMNNKSLYLIPLHLQLLFLRHLGALCPGLWGYGVTGERKVSYSVTWFCSWSPCANCSIRLAQFLHQTPNLRLRIFVSRLYFCDLEDSREREGLRILKKAGVHITVMSYKDYFYCWQTFVAKSQSKFKPWDGLHQNYIRLSRKLNRILQVQFF

SEQ ID NO: 89 - protein, 189 aa, synthetic construct
  REGION 1..189: note = pYY-BEM3.21; tr|A0A341AEK4|A0A341AEK4_9CETA polypeptide sequence
MASDRGPSAGDATSRRRIEPWEFEVSFDPRELCKETRLLYEIKWGRSQHVWRHSGKNTTNHVECNFIEKFTSERPFHRSVSCCITWFLSWSPCWECSKAIREFLNQHPRVTLFIYVARLFQHMDPQNRQGLRDLIHSGVTIQIMGPTEYDYCWRNFVNYPPGKEAHWPRYPPPLMKLYALELHCIILVP

SEQ ID NO: 90 - protein, 180 aa, synthetic construct
  REGION 1..180: note = pYY-BEM3.22; tr|E2D879|E2D879_MUSMI polypeptide sequence
RNLISRETFNFNFENLCYAKGRKNTFLCYEVTRKDCDSPVSLCHGVFKNKGSIHAEICFLYWFHDKVLKVLTPREEFKVTWYMSWSPCFECAEQVVRFLATHHNLNLTIFSSRLYNVSDPDTQQKLCRLVQEGAQVAVMDLSEFKKCWEKFVDNDGQQFRPWKRLRTNFRYQNSKLQEIL

SEQ ID NO: 91 - protein, 221 aa, synthetic construct
  REGION 1..221: note = pYY-BEM3.23; tr|A0A2K5RDN6|A0A2K5RDN6_CEBCA polypeptide sequence
MWEAQSPGLSREWGSVAISPEDPGPLHIGRFLSCAFRHPMNAMYPGIFNFHFRNLRKAYGRNETWLCFTVEGIMNRSTVSWKSGVFRNQVGSDPFCHAEMCFLSWFRHNMLSPKKDYEVTWYASWSPCPECAGQVAEFLARHGNVRLTIFTAHLYYFWNPSFRQGLRRLSQEGASVLIMGYEDFEYCWDNFVYNDGQPFKPWKRLQDNSLSLYITLQEILQ

SEQ ID NO: 92 - protein, 206 aa, synthetic construct
  REGION 1..206: note = pYY-BEM3.24; tr|A0A2K5RDN7|A0A2K5RDN7_CEBCA polypeptide sequence
MEASPASRPRPLMGPRTFTENFTNNPEVFGRHQTYLCYEVKCQGPDGTRDLMTEQRDFLCNQARNLLSGFDGRHAERCFLDRVPSWRLDPAQTYRVTCFISWSPCFSCAREVAEFLQENPHVNLRIFAARIYDCRPRYEEGLQMLQNAGAQVSIMTSEEFRHCWDTFVDHQGHPFQPWEGLDEHSQALSRRLQAILQGNRWMILSL

SEQ ID NO: 93 - protein, 184 aa, synthetic construct
  REGION 1..184: note = pYY-BEM3.25; tr|A0A1C9CJ69|A0A1C9CJ69_CERAL polypeptide sequence
NPMKAMDPHIFYFHFKNLRKAYGRNETWLCFAVEIIKQRSTVPWRTGVFRNQVDPESHCHAERCFLSWFCEDILSPNTDYRVTWYTSWSPCLDCAGEVAEFLARHSNVELAIFAARLYYFWDTHYQQGLRSLSEKGASVEIMGYEDFKYCRENFVCDDGKPFKPWKGLKTNFRFLKRRLQEILE

SEQ ID NO: 94 - protein, 197 aa, synthetic construct
  REGION 1..197: note = pYY-BEM3.26; tr|A0A2R2Z4D2|A0A2R2Z4D2_PTEAL polypeptide sequence
MHLQVWRKVTEAWREGYTLKPWSRNPMERLYHDYFYFHFYNLPTPKHRNGCYICYQVEGTKKHSRMPLLRGVFENQESLDMMLSPGEKYRVTWYISWSPCFACVDEVIKFLREHTNVELIIFAARLYHSDILQYRQGLRKLHDAGVHVAIMSYYEFKHCLNDFVFHQGRSFCPWNDLNKNSKNLSNTLEDILRNQED

SEQ ID NO: 95 - protein, 206 aa, synthetic construct
  REGION 1..206: note = pYY-BEM3.27; tr|B7T161|B7T161_SHEEP polypeptide sequence
MTEGWAGSGLPGRGDCVWTPQTRNTMNLLRETLFKQQFGNQPRVPPPYYRRKTYLCYQLKELDDLMLDKGCFRNKKQRHAEIRFIDKINSLNLNPSQSYKIICYITWSPCPNCASELVDFITRNDHLNLQIFASRLYFHWIKPFCRGLHQLQKAGISVAVMTHTEFEDCWEQFVDNQLRPFQPWDKLEQYSASIRRRLQRILTAPT

SEQ ID NO: 96 - protein, 205 aa, synthetic construct
  REGION 1..205: note = pYY-BEM3.28; tr|A0A2R2X2G4|A0A2R2X2G4_PTEAL polypeptide sequence
MAGLGQACEGCCGQMPEISYPMGRLDPKTFSFEFKNLPYAYGRKSSYLCFQVEREQHSSPVPSDWGVFKNQFCGTEPYHAELCFLNWFRAEKLSPYEHYDVTWFLSWSPCSTCAEEIAIFLSNHKNVRLNIFVSRIYYFWKPAFRQGLQELDHLGVQLDAMSFDEFKYCWENFVDNQGMPFRCWKKVHQNYKSVLRKLNEILRRR

SEQ ID NO: 97 - protein, 309 aa, synthetic construct
  REGION 1..309: note = pYY-BEM3.29; tr|G1Q1M4|G1Q1M4_MYOLU polypeptide sequence
YAELSFLDLFQSWNLDRGRQYRLTWYMSWSPYPDCAQKLVEFLGENSHVTLRIFAADIHSLCSGYEDGLRKLRDARAQLAIMTRDELQYCWVTFVDNQGQPFRPWPNLVEHIKTKKQELKDILGNPMRRMYPKTFNFNFQNLNSYGRKSTFLCFEVETWEDGSVLDYQNGVFQNQLDPGHAELCFIEWFHEKVLFPDEVRCPDAQYHVTWYISWSPCFECAEQVAGFLNEHENVDLSISAARLYLCEDEDEQGLQDLVAAGAKVAMMAPEDFEYCWDNFVYNRGWPFTYWKHVRRNYGRLQEKLDEILW

SEQ ID NO: 98 - protein, 216 aa, synthetic construct
  REGION 1..216: note = pYY-BEM3.30; tr|A0A1S3AN78|A0A1S3AN78_ERIEU polypeptide sequence
RRIEPWEFEDFFDPRQFRPETCLLYEVRWGSSRNAWRSTARNTTRHAEVNFLERFAAERHFDKPVSCSITWFLSWSPCWECSQAIGAFLSQHPQVTLAIHVTRLFHHEDEQNRQGLRDLLARGVTLQVMGDSEYAHCWRTFVNSPPGAEGHYPRYPSDFTRLYALELHCIILGLPPCLEILRRYQNQFTLFRLVPQNCHYQMIPHLNFFVVRHYFF

SEQ ID NO: 99 - protein, 201 aa, synthetic construct
  REGION 1..201: note = pYY-BEM3.32; tr|Q4VUI3|Q4VUI3_XENLA polypeptide sequence
MTMDSMLLKRNKFIYHYKNLRWARGRHETYLCYIVKRRYSSVSCALDFGYLRNRNGCHAEMLFLRYLSIWVGHDPHRNYRVTWFSSWSPCYDCAKRTLEFLKGHPNFSLRIFSARLYFCEERNAEPEGLRKLQKAGVRLSVMSYKDYFYCWNTFVETRESGFEAWDGLHENSVRLARKLRRILQPPYDMEDLREVFVLLGL

SEQ ID NO: 100 - protein, 191 aa, synthetic construct
  REGION 1..191: note = pYY-BEM3.33; tr|E2RL86|E2RL86_CANLF polypeptide sequence
MNPLQEETFYQQFSNQRVPKPTYQRRTYLCYQLKPHEGSVIAKVCLQNQEKRHAEICFIDDIKSRQLDPSQKFEITCYVTWSPCPTCAKKLIAFVNDHPHISLRLFASRLYFHWRQKYKRELRHLQKSGIPLAVMSYLEFKDCWEKFVDHKGRPFQPWNKLKQYSESIGRRLQRILQPLNNLENDFRNLRL

SEQ ID NO: 101 - protein, 226 aa, synthetic construct
  REGION 1..226: note = pYY-BEM3.34; tr|G1LWB0|G1LWB0_AILME polypeptide sequence
SSAAPASIHLLDEDTFTENFRNDDWPSRTYLCYKVEGPDQGSGVPLGQDKGILHNKPAQGPEPSRHAECYLLEQIQSWNLDPKLHYGVTCFLSWSPCAKCAQKMARFLQENSHVSLKLFASRLYTRERWDEDYKEGLRTLKRAGASIAIMTYREFEHCWKTFVLHDQEGSCFQPWPFLHKESQKFSEKLQAILQVGVLLLSLPPPLPSSPLSSPWPFPAPLRASTG

SEQ ID NO: 102 - protein, 238 aa, synthetic construct
  REGION 1..238: note = pYY-BEM3.35; tr|A0A1U7S7K7|A0A1U7S7K7_ALLSI polypeptide sequence
MGEHWQYAGSGEYIPQDQFEENFDPSVLLAETHLLSELTWGGRPYKHWYENTEHCHAEIHFLENFSSKNRSCTITWYLSWSPCAECSARIADFMQENTNVKLNIHVARLYLHDDEHTRQGLRYLMKMKRVTIQVMTIPDYTYCWNTFLEDDGEDESDDYGGYAGVHEDEDESDDDDYLPTHFAPWIMLYSLELSCILQGFAPCLKIIQGNHMSPTFQLHVQDQEQKRLLEPANPWGAD

SEQ ID NO: 103 - protein, 220 aa, synthetic construct
  REGION 1..220: note = pYY-BEM3.36; tr|A0A2R2X2J8|A0A2R2X2J8_PTEVA polypeptide sequence
MPRIGNMNLLSEKTFNYHFGNQLRVKKPQGRRRTYLCYKLKLPNETLVKGYFINKKKNHAEIRFINKIRSLNLDQTQSYKITCYITWSPCSYCAGKLVALVKSCPHLSLQIFTSRLYYHWLWKNQAGLRYLWKINISVLVMKEPEFADCWDNFVNHQSRRFKPWEKLTQYSNSTERRLLRILRINRTDLFLAQSSEQDPGLNDLVDAIKRLFLDAHRPRD

SEQ ID NO: 104 - protein, 198 aa, synthetic construct
  REGION 1..198: note = pYY-BEM3.37; tr|A0A151P6M4|A0A151P6M4_ALLMI polypeptide sequence
MAVEEEKGLLGTSQGWKIELKDFQENYMPSTWPKVTHLLYEIRWGKGSKVWRNWCSNTLTQHAEVNCLENAFGKLQFNPPVPCHITWFLSWSPCCQCCRRILQFLRAHSHITLVIKAAQLFKHMDERNRQGLRDLVQSGVHVQVMDLPDYRYCWRTFVSHPHEGEGDFWPWFFPLWITFYTLELQHILLQQHALSYNL

SEQ ID NO: 105 - protein, 158 aa, synthetic construct
  REGION 1..158: note = pYY-BEM3.38; tr|A0A2K6MNR2|A0A2K6MNR2_RHIBE polypeptide sequence
IWLCFTMEIIKQCSTVSWKRGVFRNQVDPETHCHAERCFLSWFWEDTLSPNTNYQVTWYTSWSPCLDCAGEVAEFLARHSNVKLAIFAARLYYFWDTDYQQGLRSLSEEGTSVEIMGYEDFKYCWENFVYNGDEPFKPWKGLKYNFLFLDSKLQEILE

SEQ ID NO: 106 - protein, 182 aa, synthetic construct
  REGION 1..182: note = pYY-BEM3.40; tr|F1CGT0|F1CGT0_ANOCA polypeptide sequence
KAAILLSNLFFRWQMEPEAFQRNFDPREFPECTLLLYEIHWDNNTSRNWCTNKPGLHAEENFLQIFNEKIDIKQDTPCSITWFLSWSPCYPCSQAIIKFLEAHPNVSLEIKAARLYMHQIDCNKEGLRNLGRNRVSIMNLPDYRHCWTTFVVPRGANEDYWPQDFLPAITNYSRELDSILQD

SEQ ID NO: 107 - protein, 230 aa, synthetic construct
  REGION 1..230: note = pYY-BEM3.41; tr|C7AGG3|C7AGG3_HORSE polypeptide sequence
MDPQAPTQRGGLGQAYQGGDYVQAPGNGNTQHLLSEDVFKKQFGNQRRVTKPYYRRKTYVCYQLKLLRGPTIAKGYFRNKKKRHAEIRFIDKINSLGLDQDQSYEITCYVTWSPCATCACKLIKFTRKFPNLSLRIFVSRLYYHWFRQNQQGLRQLWASSIPVVVMGYQEFADCWENFADNRGNPFQSWEKLTEYSKGIKRRLQKILEPLNLNGLEDAMGNLKLGSVDLG

SEQ ID NO: 108 - protein, 197 aa, synthetic construct
  REGION 1..197: note = pYY-BEM3.42; tr|A0A250YMK7|A0A250YMK7_CASCN polypeptide sequence
MSLLKEDIFLYQFNNQQQVQKPYFRRRTYLCYQLEQPNGSRPQWPAKGCLQNKKGHHAEIRFIKRIHSMGLEQDQDYQITCYITWSPCLACACALAELKNHFPRLTLRIFASRLYFHWIRKFQMGLQHLYKSGVLVAVMSLPEFTDCWEKFVNHRQVFFTPWDKLEEHSRSIQRRLRRILQSWDVDDLTDDFRNLRL

SEQ ID NO: 109 - protein, 189 aa, synthetic construct
  REGION 1..189: note = pYY-BEM3.43; tr|B7T160|B7T160_SHEEP polypeptide sequence
MPWISDHVARLDPETFYFQFHNLLYAYGRNCSYICYRVKTWKHRSPVSFDWGVFHNQVYAGTHCHSERRFLSWFCAKKLRPDECYHITWFMSWSPCMKCAELVAGFLGMYQNVTLSIFTARLYYFQKPQYRKGLLRLSDQGACVDIMSYQEFKYCWKKFVYSQRRPFRPWKKLKRNYQLLAAELEDILG

SEQ ID NO: 110 - protein, 541 aa, synthetic construct
  REGION 1..541: note = pYY-BEM4.1; tr|A0A182D0J1|A0A182D0J1_BLAVI polypeptide sequence
MTNPESPPQAPCDFNEDALLNREPLRGSPIKFVSPVDYPDLVFALAGPVGVDIDYIQQSISDCLKSFDYSTEFIRITEIMQDIKCSKTIDCTDMLKEYQSKIEYANELRRAYRAKDLLAALTISAISKLREQIKERDEATNKSNIQPSRRKLAWVVRQLKTPEEVRLLRAVYGKQFVLVSIYSSPQRREDFLISKIKIKSRGTIDNNTSSEGAQRLIERDSKEDNEYGQNLSGTFCLGDIFVDSNNKESAIVSIDRFLNAFFGSNEISPTRDEYGMYLAKTASLRSCDLSRQVGAAIFSKTGEIISLGSNEVPKAGGGTYWTGDNADSRDIRLGHDPNEINKVEIFAEIISRLLEDKLLSNDLLNKDAASIVTILLSKNEGKRYKDLRVMDIIEFGRIIHAEMSAICDAARNGRAIIGATLFCTTFPCHLCAKHIVASGIGRIVYLEPYPKSYAKKLHSDSIQVEDHSDSEKVSFEPFIGISPSRYRELFEGGRRKDPFGEALKWKNDPRKPVIDVVVPPHFEAEKLVIAQLGKLIVSGTG

SEQ ID NO: 111 - protein, 330 aa, synthetic construct
  REGION 1..330: note = pYY-BEM4.2; tr|A0A2D6EXD2|A0A2D6EXD2_9ARCH polypeptide sequence
MIIGLVGTIGAGKQTIIDYLQEKYGYNALSCSDVLREILKKQGKPVTRDNLREIGNKTREEGGNGAIAKILLEKLRNNWKANYIVDSLRHPDEVSVLRTSPLFHLVAVDADLRIRFERVKARKREEEPTTLPAFVERDQKEMFGTGNEQRIRETMELADELVLNNGTVEELKQRIDDLNLVSDERLRPSWDDYFMRLARLAAQRSNCMSRKVGAIITKDRRVIATGYNGTPRGVKNCNEGGCERCNSAVAKGTAISECLCLHGEENAIIEAGRVRSEGATIYTSFLPCLWCTKMIIQAGLKEVVFSEVYDLHEASIKLFETSGVLIRRLK

SEQ ID NO: 112 - protein, 367 aa, synthetic construct
  REGION 1..367: note = pYY-BEM4.3; tr|F7YVM7|F7YVM7_9THEM polypeptide sequence
MNEFKYMSLALKLAKKGKYTTSPNPMVGAVIVKDGKILATGYHKKAGQPHAEINALSKLNFQAQNCEMYVTLEPCSHYGRTPPCADAIIRSGIRKVVIATLDPNPLVNGKGVEKLKNAGIEVVCGVLEEKAKKLNEKFFKYITTKIPFVALKIAQTLDGKIALKNGESKWITSEKSREYVHKLRMEYDAVLTGIGTILKDDPQLNVRLKKVYKQPLRIILDSKLKIPLSAKVLEDPSKVIILTTALADKEKLEELRSKGVEVIITNEKNGIVDLESALKILGEKKITSVMVEAGPTLLTSFLKESLFDKIYLFIAPKIFGADSKSVFSELGLEDISKSQKFSLESVKKIGEDLLLELYPKQLKKLEE

SEQ ID NO: 113 - protein, 449 aa, synthetic construct
  REGION 1..449: note = pYY-BEM4.4; tr|A0A3M6UNF1|A0A3M6UNF1_9CNID polypeptide sequence
MEEKSELENELMRSTSPKPSVPNGSKGNECEQRETRITKENLYMVLALWMEEFPVVEQTSSAKRLNKVGVVFVLPTDRVLAADCSRDGVHGVARVMVNHCGKLEGCKVFVSRKPCSLCAKLLVQSKVSRVFYLPIEPESENKGEIARADNLFKNSSVGQSVFVPCVEQKVLDKLEDKLPKEIITPDDISECRDNLLKKCGWSAEWFARAQASLPWPCFEGKMKSQVDNDFKSLIKWIAVVKAPMDKGVAFPKVKLTSDSRVVPDCDADNFPDSKTAYHMMIFAKMLARQTDDPKTGVGAVIVRGKVPDIVSLGWNGFPSKALYGEFPRASDDDRALQKKFPYVIHAEQNALMVRNVKDLTDGILFVTKPPCDECAPMIKLSGVKTIVIGEKIEKSRGGELSYNLIKEYIKEGIMTCYQMEATKTKAKRLASDPETRKRLKSSCSNSNDV

SEQ ID NO: 114 - protein, 414 aa, synthetic construct
  REGION 1..414: note = pYY-BEM4.5; tr|A0A2G3K826|A0A2G3K826_9BURK polypeptide sequence
MTKIIDDVNTAAAAVLDQATAAANQTTFAVGGVMVNNQTGEVISAIHNNVIIPLSNNVSFTFDPTAHGERQLVYWYYANKEALKLPEPNQITVITSLDPCAMCTGALLTAGFNVGVVAIDTYAGINCAQNFQFATLPANLRTKAQKNFGYYASGAANFKPLTRSYVGGPSVAFKNGVVTPANLRDCGTVFTQSVDTVRNTSNSTGLAPSQMSNPAELPSNSAILQAYRAIYKKAFTIKIDNPRLPDAQILTELKAVLADAPNARNAVAFIDPFGNLVLCMADAFNTSPVHAAFMNVTQEYAKTRWDLMNKYAQASTTDNPALYLTHPKYGTFVYLYAPDPDDSITIMSLGAYGSTMEGPIPNMFPSNLQFYYPPRNGAQFSELVPVVNELPPFYTQNVNISLMQVPGVTQAPTK

SEQ ID NO: 115 - protein, 308 aa, synthetic construct
  REGION 1..308: note = pYY-BEM4.6; tr|K1ZCJ4|K1ZCJ4_9BACT polypeptide sequence
MSSRAKKNRSTNLKKSIGQKSIENKPTDQKKDQVLVAYVPVIHEGYRRFFRHFPAVKELWLISQELSHELRSLQKDIRALKASETKKLLQTWGQFQKIKLLTPSSLAILQKTTTQLVFPDEEISHHLVEKYFAQNRVLFASFFLRWDKKSSLKKHDLQEYSEISNKEFDQMMIAIAQQEADKSDDWWRQVGGLIFKDETILLLAHNQHTPTEAEAYFAGDPRADFHQGEYLKISTAIHAEAYLIAQAAKQGISLEGADLYVTTFPCPVCAKQVAYSGIKRVFFREGYSLLDGETILKANGVKLIRVTV

SEQ ID NO: 116 - protein, 615 aa, synthetic construct
  REGION 1..615: note = pYY-BEM4.7; tr|A0A1G3PNQ8|A0A1G3PNQ8_9SPIR polypeptide sequence
MRDLPLLVLGLTGPMGAGCTRFARDISKMEPGKVIKKQGLLDQVAHEISELSKKASEIRLQCISNGKNSELAELKRLNRRLNAKLAERACLHVIAKSSLPEPLFISLNTIVIKIAVDSITAPEFAEWAKNHAKVADLLKWLRTQWESELTLYETWGQDAGRFSQDELEKMDAMFAEFERIGDEILKEDFETYFGKRNNDFSIRMFSENIRLSGNPFRPAENGGGGGKYDEPSMVMIARETDRYIRFYRTRSDQKRSHFFIIDEIKNPREAEYFRARHQNFFLVSIFSSSEIRASRMRRGLGHDAGVSDADFQHLFRELDSRDWGADDFDAHGLHRQNIYRCFNLADIAINNDVEDERFSEVLFNKFIRYYALMLSPGCVQPTPQETYMHLAYSLSLRSTCISRQVGAVITDLEDRILSLGWNEVPEGQIGCGLKVKKDYTDKENPLFEMEIWDNVITAEDLAVWDDEDSICVKDILSRIEIKTKLKSVSLTPEERADVLKALRIKRLEYSRSLHAEENAILQVASRGGVGLKDGTIYVTTFPCELCSKKIYQVGISKIYYTEPYPNSISEKVILKDGIRNIKILQFEGVKSYSYFKLFKPGFDKKDAQMLEGRGI

SEQ ID NO: 117 - protein, 291 aa, synthetic construct
  REGION 1..291: note = pYY-BEM4.8; tr|A0A1G0PGF4|A0A1G0PGF4_9BACT polypeptide sequence
MKHNNQLRKEIEKLLGQNSIIKNDELKKLQKEYKIETDELLISFLPYAAEFAKVPISKYKVGAVVLGKSGNIYFGSNMEFEAGALSATVHAEQSAVNNAWLNGETGINKIAVTAAPCGYCRQFLNELTTAKQLHVLLKDKNLEAAKVFKLTELLPEAFGPRDLEIEGGLMKVENHKLKIENINDELINAALEAANKSYAPYSKNYSGVSIQLSDGTIFSGRYSENAAYNPSLLPFQSALAFMNMNTKKGSNNKIVDAVLVEAVSNISQKDAAGTLLNSISKTKLRYYKIKN

SEQ ID NO: 118 - protein, 398 aa, synthetic construct
  REGION 1..398: note = pYY-BEM4.9; tr|A0A0P4WGY5|A0A0P4WGY5_9EUCA polypeptide sequence
MEENSSATSQPKCASRTKQGGNDLSTDMSNLSVGETKRTDFLPWDDYFMAVAFLSAMRSKDPSSQVGACIVNADKKIVGIGYNGMPIGCSDDELPWNKESLDPLQTKYMYVCHAEMNAIMNKNSSDLAGCCVYVALFPCNECAKLVIQAGIREVVFFSDKHQQKPETVASKKMLNMAGVAYRQYTPSQSKIELNLSLKEQEKSEPTADITQSSERDQNSKRKDYLSWEEYFMAMAHLSALRSKDPITQVGACIVNSKKKIVGIGYNGMPLGCNDDLMPWGNSSSNKLETKYMYVCHAGVNAIMNKNSCDVSGCTLYVALFPCNECAKVIIQAGIKTIIYASDTNKDQASILASKKMLDMAGIKYRADNLSQRKIVIDFKTIDWNSRFMNDHQNDPTCL

SEQ ID NO: 119 - protein, 259 aa, synthetic construct
  REGION 1..259: note = pYY-BEM4.10; tr|A0A3D8IG27|A0A3D8IG27_9HELI polypeptide sequence
MRKNILYFILTLFFLSGLYATSLPEDNVVSGVIYEKIDTVSAEVDHIYPMLALAIVYKDWQEKNMLNKQGHNIGLVIVDENNMPVFWVRNSVHATHNGTQHGEVRLVSNLLNCEGFNKYLDKYTLYTTLEPCIMCAGMLSMVQIPKVVYAQKDLSCGNTQEIISTAKYPRYYKAFTVENGYKKDLEECFEQYKICKNDSITDFLVNDSAKEIFRKASNDLQDYKVKFKENRRVIKVAQEFLQNIQTKDNLDVLQCPKNM

SEQ ID NO: 120 - protein, 256 aa, synthetic construct
  REGION 1..256: note = pYY-BEM4.11; tr|A0A351C8C4|A0A351C8C4_9BACT polypeptide sequence
MNELTKQSEHLRNEALRIATRSYVPYTGQQEGVIILLENGDLIPGVRVENASFQLTIPALQNALSTMYALQRTDISMIVSSIPFTDSDLAYTGGMAEIAWEMVGASLLLVAGAHIPEAGTFIDPARGENLLDVSREAALNAFIPESDFPVGSAIQTSDDVVIDGCNVEHSDWSKIICAERNVLSTARSYGLGQITTIYVSCPKEPGGTPCGACRQVIVELAPDATVWMDRGNQEPIAMKATKLLPGHFTGNVLKKQ

SEQ ID NO: 121 - protein, 301 aa, synthetic construct
  REGION 1..301: note = pYY-BEM4.12; tr|A0A1G6V2K7|A0A1G6V2K7_PEPNI polypeptide sequence
MPIVRVNEIGARLPEDWEALETAIWQAYVSREDLPDAGELDLTLVDDATIQELNKTHRQLDKSTDVLSFPMYDDRDDLAADVQAGLPVILGDIMISVPTAERQAQAYGHSFKREMAYLLVHGLLHIAGYDHMSAEEKSAMRRAEEAILADVDVPRDTAPSKTAAVLDEADVQALIDAARAARLQAYAPYSGYAVGAALLAADGRRFCGVNVENASYGATCCAERTALFAAVTAGARDFIALALVTEGDEPAPPCGLCRQALAEFSPDLAIYLAGPTGETYRRTSLAALFPEAFSLSTKESV

SEQ ID NO: 122 - protein, 528 aa, synthetic construct
  REGION 1..528: note = pYY-BEM4.13; tr|F2NP91|F2NP91_MARHT polypeptide sequence
MPVMETHALEARFKEALARLCPEGRLLAAVSGGGDSVALLYLLKAAGRDTIVAHLDHALRPDSAADAAFVEKLAQRLGFPLETEHVDVRALAHRKRINLEAAAREVRYAFLARVARRWKARCILTAHTLDDNAETVLLQILRGAGRGLGIRPLQRRVARPLLEFSRAELRAYLEARGARWLEDPTNRSLELDRNYLRHAVLPRITARFPHALEALARFSQAQQADDWALEALSARHLIPDRRWPVPAYRALPLERAPEALRRRAIRGVLEALGVRPEARLVADVEAALGGRAQTLPGGVVVRRQRGTLFFIPPTVRFPKVQPPAGLEARPPRPGDYLVFPYGRKRLVDFLNERGVPRELKRRWPVGAVGAEVRWVYGLWPEPDEDRYMRRALVLARAAARQGEVPIGAVLVRDGAVLAEAANAVEASRDATAHAELLALRTALRRVGEKVLPGATLYVTLEPCPMCYGAILEARVARVVYGVENLKAGAFTVHGLEPRVALEAGRVEGECAKVLKDFFARLRPGRDGA

SEQ ID NO: 123 - protein, 226 aa, synthetic construct
  REGION 1..226: note = pYY-BEM4.14; tr|A0A316TX77|A0A316TX77_9BACT polypeptide sequence
MINGYTPYSGNQNTCYVKGESGTFYPGVRIENVSYPLTISSVQAAVCSCLANSDNPVEYYTGDHQPELLQVWADEYDMKPGGKLPDSPLKLFDPLVPSIPDIKKELDVLTEKSVTPNSGFPVSALLQTEKGYIRGVNIELSSWALGLCAERVAISRALTAGYTQFKSIHIYAPEADFVSPCGACRQVLLEVMPDADTELYHGDGTLSKHIVSDLLPFGFTSHKLKK

SEQ ID NO: 124 - protein, 321 aa, synthetic construct
  REGION 1..321: note = pYY-BEM4.15; tr|R6VYG3|R6VYG3_9FIRM polypeptide sequence
MIHKGTQTIETKRLILRAFTPDDAEAAFENWMSDPKVTEFLRWKTHADISDSRKIVNEWANGSADPEFYQWAIVPKDVNEPIGTISVVDRNDALGIFHIGYCIGSKWWHKGITSEAFSAVIHFLFEEVGANRIESQHDPENIHSGDVMKKCGLTFEGTLRQADFNNRGIVDACVYSILQSEWQNNTSVWQRLYNAALTVQNDRVVSPFIDAGGVAAALMTKKGNIYTGICIDTASTLGMCAERNAVANMLTNGESRIDKIVAVMPDGKVGAPCGACREYMMQLDRDSGDIEILLDLETEKTVRLKDLIPDWWGAERFGDTE

SEQ ID NO: 125 - protein, 229 aa, synthetic construct
  REGION 1..229: note = pYY-BEM4.16; tr|A0A3C1HZ18|A0A3C1HZ18_9BACI polypeptide sequence
MGDIMENWNELSEPWKRCFLQAWKAYCHGSIPIGAVLVDSEGEIFLEGRNRVHELTAPEGQLCDCRIAHAEMNVLVQVKTSDYEKLSGATIYSTMEPCIQCFGAIILSRIKNISFAAIDDKLAGATTLEDRHGFIKSRNLNIAGPFSHLGEIQIILRTDFLLRIFDSEYADPLIAAHEKDYPIGVALGRHYHRNNRLQVAKKETIPFGELFNEFSFDIKRAREGYTLGK

SEQ ID NO: 126 - protein, 205 aa, synthetic construct
  REGION 1..205: note = pYY-BEM4.17; tr|A0A1M6KV24|A0A1M6KV24_9BACT polypeptide sequence
MEASQQNILLKIEGKGPVAEINFTVTLPEWLVEQVQSGSTVFLTQKEKMRFVLELARKNVAQETGGPFAAAVFSLESGELVSAGVNVVVESRCSSAHAEVVALSLAQKAVDSHDLGAAGLPRMVLVSSAEPCAMCMGAIPWSGVKQVICGARDEDVRSVGFDEGAKPLEWVEDFAERGIEVIRDVLREEATEVLWDYRERGGEIY

SEQ ID NO: 127 - protein, 207 aa, synthetic construct
  REGION 1..207: note = pYY-BEM4.18; tr|A0A2U0T9B4|A0A2U0T9B4_9RHIZ polypeptide sequence
METAELISRLLDVIEKDIAPVTAKGVARGNKLFGAAILKKSDLAVIVAETNNEIENPLWHGEMQAIKRFFELPADQRPATRDCLFLATHEPCSLCLSGITWSGFDNFYYLFSHQDSRDGFAIPYDIQILKSVYAVPEPETGTVSPARDLYNRSNDFWTSHGLQDMIAGLARSNREALLARIDDLNALYAELSERYQRDKGGKGIPLP

SEQ ID NO: 128 - protein, 231 aa, synthetic construct
  REGION 1..231: note = pYY-BEM4.19; tr|A0A2K9PN08|A0A2K9PN08_9FLAO polypeptide sequence
MSDKKESKIKISKTSESIELDEIHSLLSYSIVQKFWENDDRNGRGYNVGVILVDENKNIVDWDINSVNKTENSTQHGEMRLISRYLDKDELYSLKGYTMYPTLEPCAMCAGMMTMTNVYRTVNGQMDYFYSKALERLSIDTRECGGYPPYPRTVISEISPSSISTRLDAEYKQYTNAGNKPIITKFLSTYKAKTIYDDAFNQFINFKCKFPENKTKYENAIKFYNSLPESI

SEQ ID NO: 129 - protein, 330 aa, synthetic construct
  REGION 1..330: note = pYY-BEM4.20; tr|F4PWM7|F4PWM7_CAVFA polypeptide sequence
MRFSLSLLFVILSVLLAGVLACKDPYNPETVDYGQCASATKANYEVRSDSKVLTPADLPADELAVHESRMRHIIDIARVNNKKFVSSIYFPNGTLACIGINTGKPNMIAHGEIVAIQNCTEIHGISMYTNYSIYTTGEPCSMCASAILWSRFKTVVWSTYNSDLYCKICMSNIPIDSSYIFSRAYGLGIEAPVAIGGVVKAEGDAWFGTYCNRPTSIYYIAPKCACQDPAKVSPLKFTQTRTTVWVEGGDKVVTQWNAIISNPSNSTIVDPPIVISPSVVFKGAPWGISAASEPNTYKLSYNKVLFPGQTFSFGYSVYGLEEVAFTALEA

SEQ ID NO: 130 - protein, 193 aa, synthetic construct
  REGION 1..193: note = pYY-BEM4.21; tr|U7QZM1|U7QZM1_PHOTE polypeptide sequence
MNKTRRKLLATLGIMSISMSFIAQAGEKKTQVINNILSKQEITEHEKYMREAIKEAIKNPKHPFGAVIVNRNNGEILSRGVNTGRNNPILHGEIQAINHYITQYGNQGWENVALYTTGEPCSMCMSALVWIGIREVIWATSISVIRNSGIRQIDISAHEIAERASSFYNPITLVGGILANETDKLFLERKRGN

SEQ ID NO: 131 - protein, 319 aa, synthetic construct
  REGION 1..319: note = pYY-BEM4.22; tr|A0A081CH48|A0A081CH48_PSEA2 polypeptide sequence
MASRRHLLATQVTGNHRKLSLWHLRGWLSPYTKLVDAVYFLTTNSFYHSLQTPPVQSITMLLSSIITSLALAAQASAYREGLHPEFQSGLSINSVPATDRDHWMRLANSAIYYPPVSHPCPQAPFGTAIVNTTSNELICAIANRVGSTGDPTQHGEITAIQHCTNVMRKKGLSPQEIIAAWKQLSLYTNAEPCTMCLSAIRWAGFKEVIYGTSVGTISENGRNQIYIPSNLVLEKSYSFGHATLMLGNILTHETDPFFQHQFNESAPCPVGCERTQVGEARVKTCEPVPNWQKLVRLEYSEDSRVGSEPVAHTPLHLEL

SEQ ID NO: 132 - protein, 203 aa, synthetic construct
  REGION 1..203: note = pYY-BEM4.23; tr|A0A3D3HMU1|A0A3D3HMU1_9GAMM polypeptide sequence
MDYSDAILGAITSIRRNSKQPGVNVTDNVTDSSTQYNNDEYWMRRALALAREAGEAGEIPVGAVLVKDNQQVAGGFNQPIRSHDPAAHAEILTLREAGAVLGNYRLIDTTLYVTLEPCMMCAGALVHSRIKRLVFGAAEPKTGAAGSFIDLLTLPRLNHYMEVTGGVLGEECSVLLSDFFRRRRAEKKALKRQNSESGSDSAS

SEQ ID NO: 133 - protein, 270 aa, synthetic construct
  REGION 1..270: note = pYY-BEM4.24; tr|A0A1N5WT13|A0A1N5WT13_9ACTN polypeptide sequence
MLEKIERRLVAAAEAVVRSPSTGDAHTVAAAAMDANGDIYSGVNVFHFTGGPCAELVVIGSAAAANAPPLITIVAVGDGDRGVIAPCGRCRQVMLDLHPDVFVIVPTGDGQLAAKPVRELLPFGYVARTGSTAPRVVYFHPRHYDTISSGLKTATVRFQDSVQTGPAVFVFDDGESIRRLDAVVEKVESRRLDHLTEEDAHHEALPDSDALRDAIKTQYPMLGDGDVVDVATFRLTAISAPDPDPRSSYPPAVSRCNPAGPRADLLVGQS

SEQ ID NO: 134 - protein, 257 aa, synthetic construct
  REGION 1..257: note = pYY-BEM4.25; tr|X0SAC5|X0SAC5_9ZZZZ polypeptide sequence
MTKDGRVIASAHDTEVTDQDSTAHAEINAIRKASKIYRKDLTGCLIISTHEPCPMCTGSIIWSNISKVVYGVSIRDSIKAGRDMINLSCKEIIKKPNAEINIYDGILKKECLKLYNNDTRKLVKKFRKYEWINIEENLLNKRMQWFENNKTMIRKLKGNDLEKAYHLILMKIGIKRSEAPIVKKSESKIIFHSKNYCPSLEACIILDLDTREVCKEIYERPTEELIRRLNSKLRFTRNYDCIRPYSDYCEEIIILEK

SEQ ID NO: 135 - protein, 154 aa, synthetic construct
  REGION 1..154: note = pYY-BEM4.26; tr|A0A3B8IC10|A0A3B8IC10_9BACT polypeptide sequence
MPSHEDFIHQCLELGKEALLQGNPPVGSVIVWQDQVIGRGIENGRSSGDITQHAELLALQEAVATGQRDKLKEAIIYSTHEPCVMCAYPIRQYKIPTVVYSVAVPELGGHTSSWHLLTTEDVPKWGKAPKIITGISAEEVEALNAAFQDSLKKG

SEQ ID NO: 136 - protein, 180 aa, synthetic construct
  REGION 1..180: note = pYY-BEM4.27; tr|A0A2N9P8B9|A0A2N9P8B9_9FLAO polypeptide sequence
MFIFKLISPPVSIEVYQDKIIQKLYICFMENIFTDEYFMKKALQEAETAFQQGEIPVGAVIVIDNRIIARSHNLTEMLNDVTAHAEMQAITASANFLGGKYLKDCTLYVTLEPCQMCAGALYWSQISKIVYGATDEQRGYRAMGAQLHPKTKVISGIMQNECTHLMKDFFKQRRSKSTKD

SEQ ID NO: 137 - protein, 178 aa, synthetic construct
  REGION 1..178: note = pYY-BEM4.28; tr|K1KX30|K1KX30_9BACT polypeptide sequence
MVKNPVNNNELYFGKHSEIPMNEEQKAYMKMAVDLSRSGMESGKGGPFGCVIVKDGKVIGIGSNSVLETNDPTAHAEIVAIRDACRNLGHFQLDGCEVYTSCEPCPMCLGAIYWARPSKVFFANDKRDAAEAGFDDDFIYQELELPYEKRKIPFEQGMQDTAKEVFQEWILKEDKTLY

SEQ ID NO: 138 - protein, 196 aa, synthetic construct
  REGION 1..196: note = pYY-BEM4.29; tr|R4XI84|R4XI84_TAPDE polypeptide sequence
MSSEIEPPSTDVHKHAVAEAADESGAADAFMQIALQQAETALLNKEVPVGCVFVHQPTGTVLATGANQTNASLNGTLHAEFVAIESILRDHPPSIFRESDLYVTVEPCVMCASALRQLQVRKVYFGCGNDRFGGCGSVFSIHSDASKTGDAAYMVESGIFRKEAIMLLRRFYLLQNESAPKPALKSTRVLKEHFDE

SEQ ID NO: 139 - protein, 212 aa, synthetic construct
  REGION 1..212: note = pYY-BEM4.30; tr|A0A239CVF7|A0A239CVF7_9DELT polypeptide sequence
MSPASKKHFPSLFSFLLLTIGLICGTAHAQPQGHTADDTAATLANASLKEHEPFIRRCYQLAIDAGKKGNHPFGALLVHKGKIVLEAENTVLTDNDFTNHAEMNLIAEAARTLSRQIIPEATVYTSCAPCAMCTATLAMAGFTRIVYGVSHDALNKRFGLKGKSVSCPALFKTMGMELEFVGPVLEKEGLRVFDFWPEKDPHAQMLKKQARK

SEQ ID NO: 140 - protein, 320 aa, synthetic construct
  REGION 1..320: note = pYY-BEM4.31; tr|A0A1Q3NME1|A0A1Q3NME1_9BACT polypeptide sequence
MTEFNYDWAKLAFSSKRPLTNLKATFIIAPREISEKRFTQLLKEYLPKGDILLGISKEDYVEGLEGQPQFAMLQQKTLQKLIDKVNDASAHKVYTLRYFQRELPAIIEKLTPPRVVGIHGSWHHSFHTLPIYYLLSEKRIPYQLVAAFSDEDEARAYEVATDKKIVRPTLEGSFDDTTVLQLTDEVAKSSYDYGFQTGAILAEKVNGVYQPVAAGFNKVVPYQTYALLNGASRETNFSPANDMNHYDTIHAEMQILVEAAKQGISLKDKTLFVNLMPCPSCARTLSQTELSEIVYRIDHSGGYAVDLLTKVGKDIRRIVY

SEQ ID NO: 141 - protein, 180 aa, synthetic construct
  REGION 1..180: note = pYY-BEM4.32; tr|A0A2G6N4N7|A0A2G6N4N7_9DELT polypeptide sequence
MKERTVSYSDRHFMAEALEMAESALTQGEFPVGCVIADGTAVVARGHRTGTTAGAVNEIDHAEINALRHLGLAGEHLDRTDLTIYSTMEPCLMCFAAIVLSGINRIVYAYEDVMGGGTGCDLTGLPPLYRDAPLTLVAGVRRRASLNLFRRFFTDPENGYWAGSLLSRYTLNQTKDSHRL

SEQ ID NO: 142 - protein, 156 aa, synthetic construct
  REGION 1..156: note = pYY-BEM4.33; tr|A0A0G0RBB8|A0A0G0RBB8_9BACT polypeptide sequence
MQSVQYNKLTHLQRRALDEAEQVLENSYNPYSHFYVGACLISEDEQLIAGTNFENAAYGSAICAERAAVLRANAMSIRRFRGIAIIARGEDFNTTEVTGPCGSCRQVLYEISQVSGCDLQVILATSKKDKIVITTIRELLPLAFGPLDLGVDIGKY

SEQ ID NO: 143 - protein, 217 aa, synthetic construct
  REGION 1..217: note = pYY-BEM4.34; tr|A0A327L2Q5|A0A327L2Q5_9RHIZ polypeptide sequence
MVTSRDGEDEAMMARCVALSRIAVGKGEYPFGAVVAREGRIVAEAINRTIRDGDVSRHAEVIALARAQKAIGRRELRECSLYSNVEPCAMCSYCIREAWVGRVVYALGSPVMGGVSKWNILRDDGLSGRMPQVFDAAPEVVSGVLVEQAQAAWRDWSPLAWEMITLRGLMTDPSARPECRTRAARPRSLWHHLVALIERPPRPYVDPTSAAEGHADL

SEQ ID NO: 144 - protein, 162 aa, synthetic construct
  REGION 1..162: note = pYY-BEM4.35; tr|S2DR30|S2DR30_9BACT polypeptide sequence
MKMKKKIEITVSLEVIQKSEWSKEDRSLIERAIHAVEHAHAPYSNFMVGTALLLDNGQIFSANNQENVSFPVGICAERAVLSYAMGNFPNNRPVKLAVVAKRRSDSTWATVTPCGLCRQTINEYEVKFGHPIEILMLNPGEEILKASGIDQLLPFRFNDLNS

SEQ ID NO: 145 - protein, 153 aa, synthetic construct
  REGION 1..153: note = pYY-BEM4.36; tr|A0A369QGF1|A0A369QGF1_9BACT polypeptide sequence
MEEHEKWMHWCLNLAQQALQQGDFPVGAVVVQKGKLIGQGVEAGQLKKDITCHAEMEAIRDARQTINTADLQNCILYSTHEPCIMCSYVIRHHKISRVVVGTTVPEVGGSSSAYPLLSAPDISIWVAPPHLVTGVLAEACQALSQAYKQKFKK

SEQ ID NO: 146 - protein, 159 aa, synthetic construct
  REGION 1..159: note = pYY-BEM4.37; tr|A0A1W6X4U4|A0A1W6X4U4_9RHIZ polypeptide sequence
MTNPSRQERWDRRFLELAKVFGTWSKDRSAGTGCVIVGPDRLLRASGYNGFARGIDDEVPERHERPAKYSWTEHAERNAIYNAAKLGISLDGCTAYVNWFPCIDCARAIVQAGIVRLVGLHPDHADQRWGSEFKFATEMLRESGIEIILYDIPELAARK

SEQ ID NO: 147 - protein, 490 aa, synthetic construct
  REGION 1..490: note = pYY-BEM4.38; tr|A0A238BW09|A0A238BW09_9BILA polypeptide sequence
MEEMARKIRTKAKKANSYCNTMTFLISKASIVLLKAECKRIELTVVIFRFLIKMNASEPNNELCDMTVIKSMLKITHVIFDLDGLLIDTEVVFSKVNQCLLSKYNKKFTPHLRGLVTGMPKKAAVTYILEHEKLSAKVDVDEYCKKYDEMAEEMLPKCSLMPGVMKLVRHLKTHSIPMAICTGATKKEFEIKTRYHKELLDLISLRVLSGDDPAVKRGKPAPDPFLVTMDRFKQKPEKAENVLVFEDAANGVCAAIAAGMNVIMVPDLTYMKIPEGLQNKINSFSDNLIISNDLNVALMSLKKELSEEEVHFLNRAFEIAVDAVLNNEVPVGCVFVFEGQEVAFGRNDVNRTKNPTYHAEMVALKMMKQWCMDNGRDLEEIMRRTTLYVTLEPCIMCASALYHLRLKKILYGAANERFGGLVSVGTREKYGAKHFIEIMPNLSVDRAVKLLKEFYEKQNPFCPEEKRKVKKPKKSGNNNDNSDDAVALNV

SEQ ID NO: 148 - protein, 159 aa, synthetic construct
  REGION 1..159: note = pYY-BEM4.39; tr|A0A1J5H6Z0|A0A1J5H6Z0_9BACT polypeptide sequence
MAYQPSEKFMQMAIDKTREGVLSGQTPFGACIVKDGKVVACEHNTVWQDTDITSHGEVHTIRAACKAIGSIDLSGCILYSTCEPCPMCFSAIHWARIDTVVYGAFIADAQDAGFNELTISNEKMKEFGGSPVNFISGFMRDENVALFKLWKEQGANNVY

SEQ ID NO: 149 - protein, 168 aa, synthetic construct
  REGION 1..168: note = pYY-BEM4.40; tr|A0A3C2D945|A0A3C2D945_9BACT polypeptide sequence
MKTTEIRIIVHEYQNIDELTENDQYLLHEARRITEFAYAPYSGFHVGAAILLGNGMIVKGNNQENSAYPSGLCAERVALFYANANYPDSEVKTIAISAAKNGILVNDPIKPCGGCRQTLSEAEVRFGSPIRIILDGQDSILVLHGVESLLPLSFSKKDLASPLAATGR

SEQ ID NO: 150 - protein, 214 aa, synthetic construct
  REGION 1..214: note = pYY-BEM4.41; tr|A0A1I7EYS3|A0A1I7EYS3_9BURK polypeptide sequence
MKFKLDPSRPPDEDDYYLGVALAVRRKANCTGNRVAAVIVKNKRVIATGYNGVPEDMPNCLDGGCLRCSNPGGQFKSGTRYDLCICVHAEQNALLTAARFGISVEGAHLYTTMQPCFGCAKEILQAKIEKVFYLHPWVPTDVDPVMDAAMKAEYAKIIGKLKVKKLDFDDPVATWAVTTMRQAALASDKNPDKKTPPKTAKKKVAKKKSRTSPR

SEQ ID NO: 151 - protein, 155 aa, synthetic construct
  REGION 1..155: note = pYY-BEM4.42; tr|H8GQX8|H8GQX8_METAL polypeptide sequence
MNHEHFMRRAIELARQAPQYPFGAVIVRRDDGQCVGQGFNRSDLNPTYHGEMVAINDCAVRHCAEDWRGFDLYTTAEPCAMCQGAIEWAGIGRVFYGTSIPYLQKLGWWQIDLRAAEVSARAVFRDTLIVGGILETECNALFAAARRGCFGTGSE

SEQ ID NO: 152 - protein, 156 aa, synthetic construct
  REGION 1..156: note = pYY-BEM4.43; tr|A0A0S8HZN3|A0A0S8HZN3_9CHLR polypeptide sequence
MDEHDIRFLRASFDVARNARKNGNHPFGALLVDEHGRIVMEAENTVITAKDCTGHAETNLMREASSKYDSDFLANCTIYTSTEPCPMCAGAIFWSNVRRVVYGLSEESLYEIAGRGSEEVLFLSCREIFERGKKLIEVIGPLLEDEAREVHMGFWR

SEQ ID NO: 153 - protein, 193 aa, synthetic construct
  REGION 1..193: note = pYY-BEM4.44; tr|E3SF31|E3SF31_9CAUD polypeptide sequence
MKPTTVLQIAYLVSQESKCCSWKVGAVIEKNGRIISTGYNGSPAGGVNCCEHAEEQGWLLNKPKPVLIPGHKSECVRFSQVDRFVLAKAHREAHSAWSKNNEIHAELNAILFAARMGSSIEGATMYVTLSPCPDCAKAISQSGIKKLVYCETYDKNIPGWDDILKNAGIEVFNVPKRSLDKLNWENINEFCGE

SEQ ID NO: 154 - protein, 330 aa, synthetic construct
  REGION 1..330: note = pYY-BEM4.45; tr|F8AAC6|F8AAC6_THEID polypeptide sequence
MIRAPWHEYFMLLAKIVALRSGCNSRPSGAVIVKNKRILATGYNGPMPGAWHCTDRGPGYCFRREKGIPDIDKYNFCRATHAEANAIAQAARFGISVEGASLYCTLAPCYVCLKLIASAGIKKVYYEHDYGSRDFERDQFWKEAIKEAGLEKFEQITVSQEVMEQLQEILPYPTSKRRLAPTEFLDEFEDGKKYGVPSIEVLFNKLNYLTRQALKDITFVIEKTTVTEEPEGISFYLSGKMVELSELINTVKKQINADQNFYFLAKHNAIEAKIEILREAENIRLKAFLNECPLESFKRIAESLDYILYQVSNSLSLPTRLELSVNLLRI

SEQ ID NO: 155 - protein, 158 aa, synthetic construct
  REGION 1..158: note = pYY-BEM4.46; tr|A0A2H4ZNK4|A0A2H4ZNK4_9EUKA polypeptide sequence
MKKQLSRKIQEEWMSRLLRNAYDAGTYGEVPIAAVILNESGQCIGWGRNCREKDQNPLGHAEIIALRQASYLKKSWRFNECTMLVTLEPCPMCAGALLQARINHIIYGASDYKRGGFGGVLDLSKNSSAHHKIEITRGVKSIQSCQLLETWFRRRRRV

SEQ ID NO: 156 - protein, 176 aa, synthetic construct
  REGION 1..176: note = pYY-BEM4.47; tr|A0A239N5N1|A0A239N5N1_9PSED polypeptide sequence
MEGRAGIIPFDEGGAAMGPAEEDSPMQHLAYMREALALARANVEAGGRPFGAVLVRDGEVIARAANGTHLDHDPTAHAELLALRAAGRALGSPRLDGCVVYASGHPCPMCLAAMHLSGVSAAYYAYSNADGEPYGLSTAAVYAQMAQPVEWQSLPLQALRPEDEEGLYGFWRERRP

SEQ ID NO: 157 - protein, 199 aa, synthetic construct
  REGION 1..199: note = pYY-BEM4.48; tr|A0A328VTR2|A0A328VTR2_9PSED polypeptide sequence
MHPEHLALLQQAPASTHADDTWARLCCEQALLAVEEGCYAVGALLVDGAGELLCSGRNQVFAPAYASAAHAEMRVLDQLEAEHAQVDRRSLTLYVSLEPCLMCYGRILLAGITRVRYLARDRDGGFALRHGRLPPAWANLASGLSVVQAKADPYWLDLAEHAIGRLQDRQTLRQRVIRAWRGQRTLTDEFSSTKRTHSG

SEQ ID NO: 158 - protein, 402 aa, synthetic construct
  REGION 1..402: note = pYY-BEM4.49; tr|A0A103YG48|A0A103YG48_CYNCS polypeptide sequence
YIRELHASSLRRDEHEIQNPKILVIVDRLSSPSLHVSLSLSLSLVIFPPFIPLNQTPTHMENAKVVEAKDGTIAVASAFSGHQEVVQDRDHKFLTRAVEEAYKGVECGDGGPFGAVVVHKDEVVASCHNMVLKHTDPTAHAEVTAIREACKKLNKIELSDCEIYASCEPCPMCFGAIHLSRIKRLIYGAKAEAAIAIGFDDFIADALRGTGFYQKAHLEIKQADGNGAMIAEQVFEKTKAKFAIDHKFLTRAVEEAYKGVECGDGRPFGALVVHKDEVVVSCHNMVLNYTDPTAHAEITAIREACKKLNRIELSDCEMYSSCEPCPMCFGAIQISRIKRLVYGAKAEASIASGIPIGDFISDALKGTGFHEKANFEIKQADGNGAMIAEQVFERTKAMFPKR

SEQ ID NO: 159 - protein, 195 aa, synthetic construct
  REGION 1..195: note = pYY-BEM4.50; tr|W5M1M8|W5M1M8_LEPOC polypeptide sequence
NSSTRESRVMAQMEINGGASPPKKPGKGQSAADQDMITGLINKALQAKEFAYCPYSNFRVGAALMTNDGRVFTGCNVENACYNLGVCAERTAILKAVSEGYESFRAIAVSSDLQDQFISPCGACRQVMREFGTGWDVFLTKVDGSYVRMTVDELLPMSFGPDDLKKKKVFSLQNGHEVSTQFYTHSPCEAGENNN

SEQ ID NO: 160 - protein, 134 aa, synthetic construct
  REGION 1..134: note = pYY-BEM4.51; tr|A0A3N5YPZ2|A0A3N5YPZ2_9ALTE polypeptide sequence
MSNSETEHIQALVDAAQAAQKQSYSPYSSFQVGAAIFADDGNTYSGCNIENVAYPLGQCAEATAIGMMIMQGAKRIEDIMIASPNDQVCPPCGGCRQKISEFGTAETKIHMVTRSGEVSTVTLGELLPLAFDSL

SEQ ID NO: 161 - protein, 162 aa, synthetic construct
  REGION 1..162: note = pYY-BEM4.52; tr|A0A2A9NC86|A0A2A9NC86_9AGAR polypeptide sequence
MTNSTLSNEDRTRLIQGAFQARKKTYSPYSNFPVGAALLTTDGRIIEGANIENASYGGTICAERTAIVKAVSDGYRHFAGIAVTTKMPTRVSPCGICRQVLREFCSLDMPVLLVPGDYPQRNPVDDDGADKPGVITEGGVRETTLGALLPDSFGPENLPPRA

SEQ ID NO: 162 - protein, 163 aa, synthetic construct
  REGION 1..163: note = pYY-BEM4.53; tr|A0A2D6RD43|A0A2D6RD43_9GAMM polypeptide sequence
MNIENLITENDETLIRRCIELAGESVKNGDKPFGALLAKDGNIIFESSNNAKTKVPYHAEILTLMDAQDKLNTTDLSDYALYSNCEPCPMCSFMIREYKLDKVVFSVHSPYMGGQSRWNILEDDVLTRFKPYFSKPPNVVGGVLESEGKRIFDKVGLWMFGKE

SEQ ID NO: 163 - protein, 204 aa, synthetic construct
  REGION 1..204: note = pYY-BEM4.54; tr|A0A0H3AVL6|A0A0H3AVL6_BRUO2 polypeptide sequence
MHAKGYSQQERRIIPFANRFRFRELCSNKSLHGLRAKFPEQYTKWDPMRKAASITKANSATPMDIALEEAHAAGERGEVPIGAVIVRDGEIIARAGNRTREFNDVTAHAEILTIRQAGEMLGSERLIDCDLYVTLEPCAMCAAAISFARIRRLYYGASDPKGGGIEHGGRFYTQPTCHHAPEIYPGFCEADARKILKDFFREKR

SEQ ID NO: 164 - protein, 165 aa, synthetic construct
  REGION 1..165: note = pYY-BEM4.55; tr|A0A242H531|A0A242H531_9ENTE polypeptide sequence
MFIVKNNIEVIQQQAELDAKFMKQALKLAKDASNNGNEPFGAVLVKNDKVILTGENQIHTESDPTYHAELGIIRDFCTSQKITDLSEYTLYTSCEPCCMCAGAMVWSNLDRMVYGLGHDELAEIAGFNIMIGSEEIFSKSPNRPEVAKGVLKEAAVPVYVDYFQR

SEQ ID NO: 165 - protein, 181 aa, synthetic construct
  REGION 1..181: note = pYY-BEM4.56; tr|A0A2R6XZE2|A0A2R6XZE2_9BACL polypeptide sequence
MSGRISWHEYFMAQAKLIALRATCTRLMVGAVIVRDRRVIAGGYNGSIAGDEHCIDVGCKVRDGHCIRTIHAEQNALMQCAKFGVSTDGAELYVTHFPCLNCTKLLIQAGIRHIYYEVPYRVDPYAIELLEKAGVGTTQITVDLNAYVQVMSKVSTDPALTYVPESKAQKDEYGQSVGKIV

SEQ ID NO: 166 - protein, 173 aa, synthetic construct
  REGION 1..173: note = pYY-BEM4.57; tr|A0A139SHT6|A0A139SHT6_9BACT polypeptide sequence
MSEANASSESLPSRNSPVELIAEAAGKFGRRPTWDEYFMATAVLISTRSSCERLNVGCVIVTAGESHKNRIVAAGYNGHLPGSPHTSRMRDGHEQATVHAEQNAISDAARRGSSVEGCTAYVTHYPCINCAKILASAGIAKICYRLDYHNDPLVKPMLAEAGIEIVQLGEAAS

SEQ ID NO: 167 - protein, 170 aa, synthetic construct
  REGION 1..170: note = pYY-BEM4.58; tr|A0A261DBH2|A0A261DBH2_9RICK polypeptide sequence
MVMKKKLITVKRSTEFNNFFMEEALKQAQFALDKNEIPVGAIIVNRITNKVIAKAHNIVEQTKNPVLHAEIVAINQSCQILSSKNLSDCDMYVTLEPCVMCSGAISFARIGRLFYAANDPKQGAIENGGRFFNSKSCFYRPEIYSGFSAKISENLIKEFFYNVRYQKCNP

SEQ ID NO: 168 - protein, 146 aa, synthetic construct
  REGION 1..146: note = pYY-BEM4.59; tr|A0A2N0XZK6|A0A2N0XZK6_9VIBR polypeptide sequence
MTDNSLHESYMRQAFELSKSALPGCRPNPPVGCVFVKDGEVVSSGFSQPPGNHHAEAGAIAAYTGSYDGLVAYVTLEPCSFQGRTPSCAKALVRVRPEKVYVAILDPDTRNSGAGIKILEDAGIDVEVGLLGEEVASFLNPYLIRN

SEQ ID NO: 169 - protein, 159 aa, synthetic construct
  REGION 1..159: note = pYY-BEM4.60; tr|A0A1V5R0F9|A0A1V5R0F9_9BACT polypeptide sequence
MTKKETTKLHALDDFCMKKALLLAKRAFRADEVPVGALVVDSSNKVIGRGYNQVEKRKSQRAHAEQLAIEQACKKIGDWRLEGCTLYVTLEPCTMCMGLIKLSRIERVVFGAASPLFGYQLDKNRKSQLYKKGVIKIRKGVGKATAAALLKDFFKNKRM

SEQ ID NO: 170 - protein, 167 aa, synthetic construct
  REGION 1..167: note = pYY-BEM4.61; tr|A0A2W0H8Y3|A0A2W0H8Y3_9BACI polypeptide sequence
MKNNGRLDHEYFMTEALQEAKEAGQRGDLPIGAVIVHNGRIIARGSNMRKTAGIKISHAENNAMHNCAPYLMKHASECVIYTTLEPCIMCLTTLVMANIDSIVFAADDKYMNMKPFIDANSYIRDRIHQYKGGVCRGESEALLRKYSPYAAELALNGTHPHHRKGGA

SEQ ID NO: 171 - protein, 165 aa, synthetic construct
  REGION 1..165: note = pYY-BEM4.62; tr|A0A261BDB7|A0A261BDB7_CAERE polypeptide sequence
LYKLYIFRMTTTKANLTQFEQELVDKAVGAMEKAYCKYSGFKVGAALVCEDGEIIIGANHENASYGATICAERSAMVTALTKGHRKFKLLAVATELEAPCSPCGICRQYLIEFGDYKVILGSSTSDQIIETTTYGLLPYAFTPKSLDDHEKEAEERNHQEGEKKH

SEQ ID NO: 172 - protein, 162 aa, synthetic construct
  REGION 1..162: note = pYY-BEM4.63; tr|A0A2E1PHI6|A0A2E1PHI6_9GAMM polypeptide sequence
MKELLIHSWLMLNSNSKLIMERVIELSEINLKNGKIPIAAVIVDKKNYEIISESQNEDSPIGHAELLAITKALKKLNTNRLDSTNLFVTIEPCPMCAYAISKCHINRLYFGSEDEKGGGVINGPRIFESHNLKKIDYVSHCYHEKTTQLMQSFFQLKRNQQL

SEQ ID NO: 173 - protein, 133 aa, synthetic construct
  REGION 1..133: note = pYY-BEM4.64; tr|A0A378LUA7|A0A378LUA7_9GAMM polypeptide sequence
MDTIIKKMISNAHNTLAHSYSPYSKFSVASCICTDKDNFYTGVNVENSAYGLAICAETSAISAMVTAGEKRIKSMVVMAGTNILCSPCGACRQRIYEFSTPDTLIHLCDKNSILRTFKINELLPEAFKFDFNP

SEQ ID NO: 174 - protein, 370 aa, synthetic construct
  REGION 1..370: note = pYY-BEM4.65; tr|A0A139HQ78|A0A139HQ78_9PEZI polypeptide sequence
MADSLKSKPGHARHDTALIHGLSQSDVQKLSESCVDAKSKAYCPYSHFRVGCAVLLANGDVVQGANVENAAYPVGTCAERVALGTAVGAKKGDFRALAVSTDISPPASPCGMCRQFIREFCELNTPILMYDKDGKSVVMTLEQLLPMSFGPDKLLPPGQLENGLMQTQTQSSFVTRAFSTTSSRRQDDTPQVPQSHYDFFPQTFPQGPPPKTSFSPDLKQLRKEFLQLQAKAHPDLAPQDQKRRAEALSMRINEAYKTLQSPLRRAQYLLSQQGIDVEDETAKLDDSSLLMEVMEAREAVEEVEDEEQLNEIRAENNGRIEESVRVLEDAFRDNEFEKAAQEAIRLRYWVNIEESIQGWEKGNGGGILHH

SEQ ID NO: 175 - protein, 165 aa, synthetic construct
  REGION 1..165: note = pYY-BEM4.66; tr|A0A2A9FXV0|A0A2A9FXV0_9VIBR polypeptide sequence
MCNLKENKDMDKYFHFACDATIEGMREGTGGPFGATLTRNGEVVCSVANTVLKDMDISGHAEMVAVREACKKLDTLDLSDCVMYATCEPCPMCVSVMLWAGIKTCYYASTHLDAAKHGFSDQQLRDYLDGSDTSTLNMVHIEDNRDDCAKIWTEFRHLNETKNDG

SEQ ID NO: 176 - protein, 509 aa, synthetic construct
  REGION 1..509: note = pYY-BEM4.67; tr|A0A1A8AG96|A0A1A8AG96_NOTFU polypeptide sequence
MEHSDRWSRAEPGLSTSSRETRDGSTQTDCKLQGHGPRLSKVNLFTLLSLWMELFPQEQDEENGQSQIRRSGLVVVREGKVVGLHCSGADLHAGQAAILQHGASLANCQLFFSRRPCATCLKMIINAGVRQITFWPGDPEISMLTSNQTHSQRTSQSITEASLDATAVEKLKSNSRPQICVLMQPLAPGVLQFVDETSRRSDFMERMMDDDPELDSEKLFNSDRLRHLKDFCRHFLIQTDQRHKDILSQMGLKNFCVEPYFSNLRSNMTELVEVLAAVAAGMPQQHYGFYREESLSLDPHPVDVSQAVARHCIVQARLLSYRTEDPKVGVGAVIWAKGQSACCCGTGRLYLIGCGYNAYPAGSKYAEYPQMDNKQEDRERRKYRYIVHAEQNALTFRTRDIKPDECSMLFVTKCPCDECIPLIRGAGVKHIYTSDQDRDKDKGDISYLRFGSLKGVCKFIWQRSPPVSSASSLHLTNGCVGKHVRQAEQQIYKNKKLCTKGSSGSSDIC

SEQ ID NO: 177 - protein, 148 aa, synthetic construct
  REGION 1..148: note = pYY-BEM4.68; tr|A0A3E2VN88|A0A3E2VN88_9FIRM polypeptide sequence
MEKEITNMDKQKLIQMAVDGLGRSYAPYSHFHVSAALLCADGTVYTGNNIENAAYTPSVCAERCAIFKAVGDGRREFEAIAVCGGPDGVIEDYCPPCGVCRQVMREFCDPSSFRVLVAKTAEDYREYTLEQLLPDGFGPDHLTGSGER

SEQ ID NO: 178 - protein, 221 aa, synthetic construct
  REGION 1..221: note = pYY-BEM4.69; tr|A0A2D5ZRJ2|A0A2D5ZRJ2_9BACT polypeptide sequence
MARPVHLHTGERRTEEGATESRAVAAVATAITRAPRAPPRPATGRERDGPPPRRVFGGGLRVGDPSGYDRGESKPIGGPLTEKRSDWHSYFMRIAGEVATRATCDRKHVGAVIVRNRTILSTGYNGSIRGMPHCDDVGHDMVDGHCIATIHAEANAILQAARNGVMIQDGSIYITASPCWNCFKLVANAGLKRVYYGEFYRDKRSFEVARRLGIDLMHIEV

SEQ ID NO: 179 - protein, 155 aa, synthetic construct
  REGION 1..155: note = pYY-BEM4.70; tr|A0A1B8WPS3|A0A1B8WPS3_9BACI polypeptide sequence
MEGVQLIYQFQWGNLIMTVNKEDLYLIDVARNTIKTLYVDGKHHVGAAVRTKTGKIYSAVHLEANIGRVSVCAEAIALGKAISEGESEFDTIVAVRHPDPTQENQKIEVVSPCGICRELISDYGKGTNVILKNKEGYIKTVISDLLPNKYIREDN

SEQ ID NO: 180 - protein, 156 aa, synthetic construct
  REGION 1..156: note = pYY-BEM4.71; tr|A0A1W5ZQK9|A0A1W5ZQK9_9BACI polypeptide sequence
MNRFMERAVSLAAENVRVGGQPFGAVLVKDDELVAEGVNEMHLNYDVSGHAELLAIRRAQGELQTHDLSGYTMYASGEPCPMCLSAMYFAGIKDVFYCATVEEAAQVGLEKSKNVYDDLQKSKGERSLVMKQMPLEDDQEDPMKLWDERTNHNGTS

SEQ ID NO: 181 - protein, 340 aa, synthetic construct
  REGION 1..340: note = pYY-BEM4.72; tr|A0A378V0W4|A0A378V0W4_MYCFO polypeptide sequence
MVHAQFDPTARQALAATAVEAKTRKDLTWQQIADAAELSPAFVTAAVLGQHALPARSAEAVAALLGLDDDAALLLQTIPIRGSIPGGIPTDPTIYRFYEMLQVYGTTLKALVHEQFGDGIISAINFKLDVRKVADPEGGERAVITLDGKYLPPNPFDRVRYRGGLMDFAQRTIDIARQNVAEGGRPFATVIVKNGEILAESPNLVAQTHDPTAHAEILAIRKACTRIGTEHLIGATIYVLAQPCPMCLGSLYYCSPDEVVFLTTRDAYEPHYVDDRKYFELNMFYDEFAKPWDQRRLPMRYEPRDAAVDVYKLWQERNGGERRVPGAPTSTRPGKNPRGE

SEQ ID NO: 182 - protein, 157 aa, synthetic construct
  REGION 1..157: note = pYY-BEM4.73; tr|I3XF03|I3XF03_RHIFR polypeptide sequence
MKQRCMSPKSAQRFWDNDMHNNKDRPMSENELFVAAREAMAKAHAPYSKFPVGAAIRAEDGQIYTGANIENLSFPEGWCAETTAISHMVMAGQRKIMEVAVIAEKLALCPPCGGCRQRLAEFSGASTRIYLCDETGIKKSLALSDLLPHSFETEILG

SEQ ID NO: 183 - protein, 595 aa, synthetic construct
  REGION 1..595: note = pYY-BEM4.74; tr|F8IEF3|F8IEF3_ALIAT polypeptide sequence
MDAKELETRGWLCMRAVDVIDKKRRGEALAEEELRFLIEGYVAGRIPDYQMSAFLMAVVWRGMTREETLVLTRLLADSGERLDLSGIPGVKVDKHSTGGVGDKATLVVLPLVASIGVPVIKMSGRGLGHTGGTIDKLESIPGFRTDLSVAELVAQVRQVGIALGGQTADLAPADKKLYALRDVTGTVESLPLIASSVMSKKLAGGADAIVLDVKVGDGAFMKSRSDARRLARLMVEIGEAAGRRTVAVLSNMDQPLGCAIGNALEVAEAIRVLSGEGPFDLAEIALALAEEMTVLAGVAATREEARRMLRQSVAEGRALETLRRWIAAQGGDPAVVDDPSRLPQAPVQMPYLPKKAGFVAKLSALAFGLAAMRLGAGRETKEEAIDPSVGIVLHAKVGDRVQTHRPMFTVHARTGEDALRCIQELEAAIQISDDPVEAPPLILARIDRSEALPYADLMDAAREARDRAYVPYSGFAVGAALELADGRMVTGANVENASYGLTNCAERSAVFRAVAEGGPGTKPEIRAVAVIADSPEPVSPCGACRQVLAEFCSPDTPVYLGNLQGDVRETTVGALLPGAFTDAQMANVRRQDKEA

SEQ ID NO: 184 - protein, 153 aa, synthetic construct
  REGION 1..153: note = pYY-BEM4.75; tr|A0A1G3M638|A0A1G3M638_9SPIR polypeptide sequence
MKTTNINALDKWDLRFLQMAEHVAEWSKDPSTKVGAVIVRPDRTIASVGFNGFARGVRDTVERLWNRELKYPLTVHAELNAILSAHEPVRGHSLYVSPLSPCSNCAGVIIQSGIARVVAKCGQVNNPAQWSESFNLALTAFAEAGVSVILVEH

SEQ ID NO: 185 - protein, 177 aa, synthetic construct
  REGION 1..177: note = pYY-BEM4.76; tr|A0A3D9LFR2|A0A3D9LFR2_9MICC polypeptide sequence
MEQNDHGSSGAFSDPFEDDIPLTASLPRITGTGSGIDWQRLESTARAAMTRAYVPYSRFPVGAAALVEDGRVVAGCNIENASLGLTLCAECSLVSNLQMSGGGRIVAFYCVDGNGEVLMPCGRCRQLLYEFHAPGMRLMGPDGELTMDEVLPLAFGPADMTHLSDSAASTDDPGRTR

SEQ ID NO: 186 - protein, 172 aa, synthetic construct
  REGION 1..172: note = pYY-BEM4.77; tr|A0A3B9YGB5|A0A3B9YGB5_9BACT polypeptide sequence
MAKPISKKYRKLIETAKAARKKAYSPYSRYQVGAAVLTESGRIYSGANMENASYGLCMCAERVAIANAVTRGEKVLQAVCVVGKKARPCGACRQVMLEFSTKETELLMVDIDPNARRDTVIRTRVYSMLPNPFDPFESGMLPQHPQNLLRRRKSPQPRRKRRSRPVHREVSR

SEQ ID NO: 187 - protein, 391 aa, synthetic construct
  REGION 1..391: note = pYY-BEM4.78; tr|A0A182F569|A0A182F569_ANOAL polypeptide sequence
MPRPSQFRVSSSQSLSNSQIQASQSSDSVVDITSYVNAVVKALLNLSCTKTIIKRADLVNIALKGNGRLIGRVLQDANIELKEIYGYELIEVEKSKTMILCSTLAAGSMDELNDANRRRYTFLYLILGYIFMKNGSVPETIVWEFLETLGIEEQQEHNYFGDVRKLYDSLFKQAYLTRTKQALEGLNDDVMLISWGVRSKHEVSKKDILAGFCKVMNRDPVDFKAQYIEANEKDDKMNNNINGTVDGRNTVEYSSLDASVKELIEAAIKVRNNAYCPYSNFAVGAALRTVGGDIVTGCNVENGTFGPSVCAERTAVCKAVSEGHREFTAVAVVAFQETEFTAPCGTCRQTLSEFSRKDIPIYLVKPSPVRVMVTSLFQLLPHAFSPSFLNK

SEQ ID NO: 188 - protein, 151 aa, synthetic construct
  REGION 1..151: note = pYY-BEM4.79; tr|A0A264Z0D4|A0A264Z0D4_9BACI polypeptide sequence
MEPKKLIEEAIVASKQAYVQYSNFHVGAALLTKDGKLYHGCNIENASYGLTNCAERTAIFKAVSEGEKEFQAIAVVGDTEGPISPCGACRQVLAEFFSPDTVVILANLKGDHVVTNINELLPGFFSSKDLQKKVKNCFEKNALGSSCLRPI

SEQ ID NO: 189 - protein, 229 aa, synthetic construct
  REGION 1..229: note = pYY-BEM4.80; tr|A0A1L9Q1R3|A0A1L9Q1R3_ASPVE polypeptide sequence
MPLSAEEAALVETATATINSIPLSEDYSVASAAKASDGRVFTGVNVYHFTGGPCAELVVLGVAAAAGAAQLTHIVAVANEQRGILSPCGRCRQVLLDLQPNIQVIVGKEGSEQSVPVAQLLPFSYRQPDQHTPVIFKALTSSGPVVVDFFATWCGPCKAVAPVVGKLSETYTDVRFIQVDVDKARSISQEHDIRAMPTFVLYKDGKLLDKRVVGGNMKELEEQIKAIIA

SEQ ID NO: 190 - protein, 18 aa, synthetic construct
  REGION 1..18: note = synthetic peptide
KRTADGSEFESPKKKRKV

SEQ ID NO: 191 - protein, 16 aa, synthetic construct
  REGION 1..16: note = synthetic peptide
KRPAATKKAGQAKKKK

SEQ ID NO: 192 - protein, 17 aa, synthetic construct
  REGION 1..17: note = synthetic peptide
KKTELQTTNAENKTKKL

SEQ ID NO: 193 - protein, 19 aa, synthetic construct
  REGION 1..19: note = synthetic peptide
KRGINDRNFWRGENGRKTR

SEQ ID NO: 194 - protein, 16 aa, synthetic construct
  REGION 1..16: note = synthetic peptide
RKSGKIAAIVVKRPRK

SEQ ID NO: 195 - protein, 7 aa, synthetic construct
  REGION 1..7: note = synthetic peptide
PKKKRKV

SEQ ID NO: 196 - protein, 30 aa, synthetic construct
  REGION 1..30: note = synthetic polypeptide
MDSLLMNRRKFLYQFKNVRWAKGRRETYLC

SEQ ID NO: 197 - protein, 1368 aa, Streptococcus pyogenes [sequence omitted]

SEQ ID NO: 198 - DNA, 4104 bp, Streptococcus pyogenes
  misc_feature 1..4104: note = wild type spCas9 polynucleotide sequence
  source 1..4104: mol_type = genomic DNA
atggataagaaatactcaataggcttagatatcggcacaaatagcgtcggatgggcggtgatcactgatgattataaggttccgtctaaaaagttcaaggttctgggaaatacagaccgccacagtatcaaaaaaaatcttataggggctcttttatttggcagtggagagacagcggaagcgactcgtctcaaacggacagctcgtagaaggtatacacgtcggaagaatcgtatttgttatctacaggagattttttcaaatgagatggcgaaagtagatgatagtttctttcatcgacttgaagagtcttttttggtggaagaagacaagaagcatgaacgtcatcctatttttggaaatatagtagatgaagttgcttatcatgagaaatatccaactatctatcatctgcgaaaaaaattggcagattctactgataaagcggatttgcgcttaatctatttggccttagcgcatatgattaagtttcgtggtcattttttgattgagggagatttaaatcctgataatagtgatgtggacaaactatttatccagttggtacaaatctacaatcaattatttgaagaaaaccctattaacgcaagtagagtagatgctaaagcgattctttctgcacgattgagtaaatcaagacgattagaaaatctcattgctcagctccccggtgagaagagaaatggcttgtttgggaatctcattgctttgtcattgggattgacccctaattttaaatcaaattttgatttggcagaagatgctaaattacagctttcaaaagatacttacgatgatgatttagataatttattggcgcaaattggagatcaatatgctgatttgtttttggcagctaagaatttatcagatgctattttactttcagatatcctaagagtaaatagtgaaataactaaggctcccctatcagcttcaatgattaagcgctacgatgaacatcatcaagacttgactcttttaaaagctttagttcgacaacaacttccagaaaagtataaagaaatcttttttgatcaatcaaaaaacggatatgcaggttatattgatgggggagctagccaagaagaattttataaatttatcaaaccaattttagaaaaaatggatggtactgaggaattattggtgaaactaaatcgtgaagatttgctgcgcaagcaacggacctttgacaacggctctattccccatcaaattcacttgggtgagctgcatgctattttgagaagacaagaagacttttatccatttttaaaagacaatcgtgagaagattgaaaaaatcttgacttttcgaattccttattatgttggtccattggcgcgtggcaatagtcgttttgcatggatgactcggaagtctgaagaaacaattaccccatggaattttgaagaagttgtcgataaaggtgcttcagctcaatcatttattgaacgcatgacaaactttgataaaaatcttccaaatgaaaaagtactaccaaaacatagtttgctttatgagtattttacggtttataacgaattgacaaaggtcaaatatgttactgagggaatgcgaaaaccagcatttctttcaggtgaacagaagaaagccattgttgatttactcttcaaaacaaatcgaaaagtaaccgttaagcaattaaaagaagattatttcaaaaaaatagaatgttttgatagtgttgaaatttcaggagttgaagatagatttaatgcttcattaggcgcctaccatgatttgctaaaaattattaaagataaagattttttggataatgaagaaaatgaagatatcttagaggatattgttttaacattgaccttatttgaagatagggggatgattgaggaaagacttaaaacatatgctcacctctttgatgataaggtgatgaaacagcttaaacgtcgccgttatactggttggggacgtttgtctcgaaaattgattaatggtattagggataagcaatctggcaaaacaatattagattttttgaaatcagatggttttgccaatcgcaattttatgcagctgatccatgatgatagtttgacatttaaagaagatattcaaaaagcacaggtgtctggacaaggccatagtttacatgaacagattgctaacttagctggcagtcctgctattaaaaaaggtattttacagactgtaaaaattgttgatgaactggtcaaagtaatggggcataagccagaaaatatcgttattgaaatggcacgtgaaaatcagacaactcaaaagggccagaaaaattcgcgagagcgtatgaaacgaatcgaagaaggtatcaaagaattaggaagtcagattcttaaagagcatcctgttgaaaatactcaattgcaaaatgaaaagctctatctctattatctacaaaatggaagagacatgtatgtggaccaagaattagatattaatcgtttaagtgattatgatgtcgatcacattgttccacaaagtttcattaaagacgattcaatagacaataaggtactaacgcgttctgataaaaatcgtggtaaatcggataacgttccaagtgaagaagtagtcaaaaagatgaaaaactattggagacaacttctaaacgccaagttaatcactcaacgtaagtttgataatttaacgaaagctgaacgtggaggtttgagtgaacttgataaagctggttttatcaaacgccaattggttgaaactcgccaaatcactaagcatgtggcacaaattttggatagtcgcatgaatactaaatacgatgaaaatgataaacttattcgagaggttaaagtgattaccttaaaatctaaattagtttctgacttccgaaaagatttccaattctataaagtacgtgagattaacaattaccatcatgcccatgatgcgtatctaaatgccgtcgttggaactgctttgattaagaaatatccaaaacttgaatcggagtttgtctatggtgattataaagtttatgatgttcgtaaaatgattgctaagtctgagcaagaaataggcaaagcaaccgcaaaatatttcttttactctaatatcatgaacttcttcaaaacagaaattacacttgcaaatggagagattcgcaaacgccctctaatcgaaactaatggggaaactggagaaattgtctgggataaagggcgagattttgccacagtgcgcaaagtattgtccatgccccaagtcaatattgtcaagaaaacagaagtacagacaggcggattctccaaggagtcaattttaccaaaaagaaattcggacaagcttattgctcgtaaaaaagactgggatccaaaaaaatatggtggttttgatagtccaacggtagcttattcagtcctagtggttgctaaggtggaaaaagggaaatcgaagaagttaaaatccgttaaagagttactagggatcacaattatggaaagaagttcctttgaaaaaaatccgattgactttttagaagctaaaggatataaggaagttaaaaaagacttaatcattaaactacctaaatatagtctttttgagttagaaaacggtcgtaaacggatgctggctagtgccggagaattacaaaaaggaaatgagctggctctgccaagcaaatatgtgaattttttatatttagctagtcattatgaaaagttgaagggtagtccagaagataacgaacaaaaacaattgtttgtggagcagcataagcattatttagatgagattattgagcaaatcagtgaattttctaagcgtgttattttagcagatgccaatttagataaagttcttagtgcatataacaaacatagagacaaaccaatacgtgaacaagcagaaaatattattcatttatttacgttgacgaatcttggagctcccgctgcttttaaatattttgatacaacaattgatcgtaaacgatatacgtctacaaaagaagttttagatgccactcttatccatcaatccatcactggtctttatgaaacacgcattgatttgagtcagctaggaggtgactga

SEQ ID NO: 199 - protein, 1367 aa, Streptococcus pyogenes
  REGION 1..1367: note = MISC_FEATURE - spCas9 polypeptide sequence
MDKKYSIGLDIGTNSVGWAVITDDYKVPSKKFKVLGNTDRHSIKKNLIGALLFGSGETAEATRLKRTARRRYTRRKNRICYLQEIFSNEMAKVDDSFFHRLEESFLVEEDKKHERHPIFGNIVDEVAYHEKYPTIYHLRKKLADSTDKADLRLIYLALAHMIKFRGHFLIEGDLNPDNSDVDKLFIQLVQIYNQLFEENPINASRVDAKAILSARLSKSRRLENLIAQLPGEKRNGLFGNLIALSLGLTPNFKSNFDLAEDAKLQLSKDTYDDDLDNLLAQIGDQYADLFLAAKNLSDAILLSDILRVNSEITKAPLSASMIKRYDEHHQDLTLLKALVRQQLPEKYKEIFFDQSKNGYAGYIDGGASQEEFYKFIKPILEKMDGTEELLVKLNREDLLRKQRTFDNGSIPHQIHLGELHAILRRQEDFYPFLKDNREKIEKILTFRIPYYVGPLARGNSRFAWMTRKSEETITPWNFEEVVDKGASAQSFIERMTNFDKNLPNEKVLPKHSLLYEYFTVYNELTKVKYVTEGMRKPAFLSGEQKKAIVDLLFKTNRKVTVKQLKEDYFKKIECFDSVEISGVEDRFNASLGAYHDLLKIIKDKDFLDNEENEDILEDIVLTLTLFEDRGMIEERLKTYAHLFDDKVMKQLKRRRYTGWGRLSRKLINGIRDKQSGKTILDFLKSDGFANRNFMQLIHDDSLTFKEDIQKAQVSGQGHSLHEQIANLAGSPAIKKGILQTVKIVDELVKVMGHKPENIVIEMARENQTTQKGQKNSRERMKRIEEGIKELGSQILKEHPVENTQLQNEKLYLYYLQNGRDMYVDQELDINRLSDYDVDHIVPQSFIKDDSIDNKVLTRSDKNRGKSDNVPSEEVVKKMKNYWRQLLNAKLITQRKFDNLTKAERGGLSELDKAGFIKRQLVETRQITKHVAQILDSRMNTKYDENDKLIREVKVITLKSKLVSDFRKDFQFYKVREINNYHHAHDAYLNAVVGTALIKKYPKLESEFVYGDYKVYDVRKMIAKSEQEIGKATAKYFFYSNIMNFFKTEITLANGEIRKRPLIETNGETGEIVWDKGRDFATVRKVLSMPQVNIVKKTEVQTGGFSKESILPKRNSDKLIARKKDWDPKKYGGFDSPTVAYSVLVVAKVEKGKSKKLKSVKELLGITIMERSSFEKNPIDFLEAKGYKEVKKDLIIKLPKYSLFELENGRKRMLASAGELQKGNELALPSKYVNFLYLASHYEKLKGSPEDNEQKQLFVEQHKHYLDEIIEQISEFSKRVILADANLDKVLSAYNKHRDKPIREQAENIIHLFTLTNLGAPAAFKYFDTTIDRKRYTSTKEVLDATLIHQSITGLYETRIDLSQLGGD

SEQ ID NO: 200 - DNA, 4212 bp, synthetic construct
  misc_feature 1..4212: note = wild-type Cas9 polynucleotide sequence
  misc_feature 5..58: note = RuvC domain
  misc_feature 718..764: note = RuvC domain
  misc_feature 772..901: note = HNH domain
  misc_feature 906..1101: note = RuvC domain
  source 1..4212: mol_type = other DNA
atggataaaaagtattctattggtttagacatcggcactaattccgttggatgggctgtcataaccgatgaatacaaagtaccttcaaagaaatttaaggtgttggggaacacagaccgtcattcgattaaaaagaatcttatcggtgccctcctattcgatagtggcgaaacggcagaggcgactcgcctgaaacgaaccgctcggagaaggtatacacgtcgcaagaaccgaatatgttacttacaagaaatttttagcaatgagatggccaaagttgacgattctttctttcaccgtttggaagagtccttccttgtcgaagaggacaagaaacatgaacggcaccccatctttggaaacatagtagatgaggtggcatatcatgaaaagtacccaacgatttatcacctcagaaaaaagctagttgactcaactgataaagcggacctgaggttaatctacttggctcttgcccatatgataaagttccgtgggcactttctcattgagggtgatctaaatccggacaactcggatgtcgacaaactgttcatccagttagtacaaacctataatcagttgtttgaagagaaccctataaatgcaagtggcgtggatgcgaaggctattcttagcgcccgcctctctaaatcccgacggctagaaaacctgatcgcacaattacccggagagaagaaaaatgggttgttcggtaaccttatagcgctctcactaggcctgacaccaaattttaagtcgaacttcgacttagctgaagatgccaaattgcagcttagtaaggacacgtacgatgacgatctcgacaatctactggcacaaattggagatcagtatgcggacttatttttggctgccaaaaaccttagcgatgcaatcctcctatctgacatactgagagttaatactgagattaccaaggcgccgttatccgcttcaatgatcaaaaggtacgatgaacatcaccaagacttgacacttctcaaggccctagtccgtcagcaactgcctgagaaatataaggaaatattctttgatcagtcgaaaaacgggtacgcaggttatattgacggcggagcgagtcaagaggaattctacaagtttatcaaacccatattagagaagatggatgggacggaagagttgcttgtaaaactcaatcgcgaagatctactgcgaaagcagcggactttcgacaacggtagcattccacatcaaatccacttaggcgaattgcatgctatacttagaaggcaggaggatttttatccgttcctcaaagacaatcgtgaaaagattgagaaaatcctaacctttcgcataccttactatgtgggacccctggcccgagggaactctcggttcgcatggatgacaagaaagtccgaagaaacgattactccatggaattttgaggaagttgtcgataaaggtgcgtcagctcaatcgttcatcgagaggatgaccaactttgacaagaatttaccgaacgaaaaagtattgcctaagcacagtttactttacgagtatttcacagtgtacaatgaactcacgaaagttaagtatgtcactgagggcatgcgtaaacccgcctttctaagcggagaacagaagaaagcaatagtagatctgttattcaagaccaaccgcaaagtgacagttaagcaattgaaagaggactactttaagaaaattgaatgcttcgattctgtcgagatctccggggtagaagatcgatttaatgcgtcacttggtacgtatcatgacctcctaaagataattaaagataaggacttcctggataacgaagagaatgaagatatcttagaagatatagtgttgactcttaccctctttgaagatcgggaaatgattgaggaaagactaaaaacatacgctcacctgttcgacgataaggttatgaaacagttaaagaggcgtcgctatacgggctggggacgattgtcgcggaaacttatcaacgggataagagacaagcaaagtggtaaaactattctcgattttctaaagagcgacggcttcgccaataggaactttatgcagctgatccatgatgactctttaaccttcaaagaggatatacaaaaggcacaggtttccggacaaggggactcattgcacgaacatattgcgaatcttgctggttcgccagccatcaaaaagggcatactccagacagtcaaagtagtggatgagctagttaaggtcatgggacgtcacaaaccggaaaacattgtaatcgagatggcacgcgaaaatcaaacgactcagaaggggcaaaaaaacagtcgagagcggatgaagagaatagaagagggtattaaagaactgggcagccagatcttaaaggagcatcctgtggaaaatacccaattgcagaacgagaaactttacctctattacctacaaaatggaagggacatgtatgttgatcaggaactggacataaaccgtttatctgattacgacgtcgatcacattgtaccccaatcctttttgaaggacgattcaatcgacaataaagtgcttacacgctcggataagaaccgagggaaaagtgacaatgttccaagcgaggaagtcgtaaagaaaatgaagaactattggcggcagctcctaaatgcgaaactgataacgcaaagaaagttcgataacttaactaaagctgagaggggtggcttgtctgaacttgacaaggccggatttattaaacgtcagctcgtggaaacccgccaaatcacaaagcatgttgcacagatactagattcccgaatgaatacgaaatacgacgagaacgataagctgattcgggaagtcaaagtaatcactttaaagtcaaaattggtgtcggacttcagaaaggattttcaattctataaagttagggagataaataactaccaccatgcgcacgacgcttatcttaatgccgtcgtagggaccgcactcattaagaaatacccgaagctagaaagtgagtttgtgtatggtgattacaaagtttatgacgtccgtaagatgatcgcgaaaagcgaacaggagataggcaaggctacagccaaatacttcttttattctaacattatgaatttctttaagacggaaatcactctggcaaacggagagatacgcaaacgacctttaattgaaaccaatggggagacaggtgaaatcgtatgggataagggccgggacttcgcgacggtgagaaaagttttgtccatgccccaagtcaacatagtaaagaaaactgaggtgcagaccggagggttttcaaaggaatcgattcttccaaaaaggaatagtgataagctcatcgctcgtaaaaaggactgggacccgaaaaagtacggtggcttcgatagccctacagttgcctattctgtcctagtagtggcaaaagttgagaagggaaaatccaagaaactgaagtcagtcaaagaattattggggataacgattatggagcgctcgtcttttgaaaagaaccccatcgacttccttgaggcgaaaggttacaaggaagtaaaaaaggatctcataattaaactaccaaagtatagtctgtttgagttagaaaatggccgaaaacggatgttggctagcgccggagagcttcaaaaggggaacgaactcgcactaccgtctaaatacgtgaatttcctgtatttagcgtcccattacgagaagttgaaaggttcacctgaagataacgaacagaagcaactttttgttgagcagcacaaacattatctcgacgaaatcatagagcaaatttcggaattcagtaagagagtcatcctagctgatgccaatctggacaaagtattaagcgcatacaacaagcacagggataaacccatacgtgagcaggcggaaaatattatccatttgtttactcttaccaacctcggcgctccagccgcattcaagtattttgacacaacgatagatcgcaaacgatacacttctaccaaggaggtgctagacgcgacactgattcaccaatccatcacgggattatatgaaactcggatagatttgtcacagcttgggggtgacggatcccccaagaagaagaggaaagtctcgagcgactacaaagaccatgacggtgattataaagatcatgacatcgattacaaggatgacgatgacaaggctgcagga

SEQ ID NO: 201 - protein, 1368 aa, synthetic construct
  REGION 1..1368: note = exemplary catalytically active Cas9 nickase (nCas9) polypeptide sequence
MDKKYSIGLAIGTNSVGWAVITDEYKVPSKKFKVLGNTDRHSIKKNLIGALLFDSGETAEATRLKRTARRRYTRRKNRICYLQEIFSNEMAKVDDSFFHRLEESFLVEEDKKHERHPIFGNIVDEVAYHEKYPTIYHLRKKLVDSTDKADLRLIYLALAHMIKFRGHFLIEGDLNPDNSDVDKLFIQLVQTYNQLFEENPINASGVDAKAILSARLSKSRRLENLIAQLPGEKKNGLFGNLIALSLGLTPNFKSNFDLAEDAKLQLSKDTYDDDLDNLLAQIGDQYADLFLAAKNLSDAILLSDILRVNTEITKAPLSASMIKRYDEHHQDLTLLKALVRQQLPEKYKEIFFDQSKNGYAGYIDGGASQEEFYKFIKPILEKMDGTEELLVKLNREDLLRKQRTFDNGSIPHQIHLGELHAILRRQEDFYPFLKDNREKIEKILTFRIPYYVGPLARGNSRFAWMTRKSEETITPWNFEEVVDKGASAQSFIERMTNFDKNLPNEKVLPKHSLLYEYFTVYNELTKVKYVTEGMRKPAFLSGEQKKAIVDLLFKTNRKVTVKQLKEDYFKKIECFDSVEISGVEDRFNASLGTYHDLLKIIKDKDFLDNEENEDILEDIVLTLTLFEDREMIEERLKTYAHLFDDKVMKQLKRRRYTGWGRLSRKLINGIRDKQSGKTILDFLKSDGFANRNFMQLIHDDSLTFKEDIQKAQVSGQGDSLHEHIANLAGSPAIKKGILQTVKVVDELVKVMGRHKPENIVIEMARENQTTQKGQKNSRERMKRIEEGIKELGSQILKEHPVENTQLQNEKLYLYYLQNGRDMYVDQELDINRLSDYDVDHIVPQSFLKDDSIDNKVLTRSDKNRGKSDNVPSEEVVKKMKNYWRQLLNAKLITQRKFDNLTKAERGGLSELDKAGFIKRQLVETRQITKHVAQILDSRMNTKYDENDKLIREVKVITLKSKLVSDFRKDFQFYKVREINNYHHAHDAYLNAVVGTALIKKYPKLESEFVYGDYKVYDVRKMIAKSEQEIGKATAKYFFYSNIMNFFKTEITLANGEIRKRPLIETNGETGEIVWDKGRDFATVRKVLSMPQVNIVKKTEVQTGGFSKESILPKRNSDKLIARKKDWDPKKYGGFDSPTVAYSVLVVAKVEKGKSKKLKSVKELLGITIMERSSFEKNPIDFLEAKGYKEVKKDLIIKLPKYSLFELENGRKRMLASAGELQKGNELALPSKYVNFLYLASHYEKLKGSPEDNEQKQLFVEQHKHYLDEIIEQISEFSKRVILADANLDKVLSAYNKHRDKPIREQAENIIHLFTLTNLGAPAAFKYFDTTIDRKRYTSTKEVLDATLIHQSITGLYETRIDLSQLGGD

SEQ ID NO: 202 - DNA, 4107 bp, Streptococcus pyogenes
  misc_feature 1..4107: note = Cas9 from Streptococcus pyogenes (NCBI Ref. Seq.: NC_002737.2)polynucleotide sequence
  source 1..4107: mol_type = genomic DNA
atggataagaaatactcaataggcttagatatcggcacaaatagcgtcggatgggcggtgatcactgatgaatataaggttccgtctaaaaagttcaaggttctgggaaatacagaccgccacagtatcaaaaaaaatcttataggggctcttttatttgacagtggagagacagcggaagcgactcgtctcaaacggacagctcgtagaaggtatacacgtcggaagaatcgtatttgttatctacaggagattttttcaaatgagatggcgaaagtagatgatagtttctttcatcgacttgaagagtcttttttggtggaagaagacaagaagcatgaacgtcatcctatttttggaaatatagtagatgaagttgcttatcatgagaaatatccaactatctatcatctgcgaaaaaaattggtagattctactgataaagcggatttgcgcttaatctatttggccttagcgcatatgattaagtttcgtggtcattttttgattgagggagatttaaatcctgataatagtgatgtggacaaactatttatccagttggtacaaacctacaatcaattatttgaagaaaaccctattaacgcaagtggagtagatgctaaagcgattctttctgcacgattgagtaaatcaagacgattagaaaatctcattgctcagctccccggtgagaagaaaaatggcttatttgggaatctcattgctttgtcattgggtttgacccctaattttaaatcaaattttgatttggcagaagatgctaaattacagctttcaaaagatacttacgatgatgatttagataatttattggcgcaaattggagatcaatatgctgatttgtttttggcagctaagaatttatcagatgctattttactttcagatatcctaagagtaaatactgaaataactaaggctcccctatcagcttcaatgattaaacgctacgatgaacatcatcaagacttgactcttttaaaagctttagttcgacaacaacttccagaaaagtataaagaaatcttttttgatcaatcaaaaaacggatatgcaggttatattgatgggggagctagccaagaagaattttataaatttatcaaaccaattttagaaaaaatggatggtactgaggaattattggtgaaactaaatcgtgaagatttgctgcgcaagcaacggacctttgacaacggctctattccccatcaaattcacttgggtgagctgcatgctattttgagaagacaagaagacttttatccatttttaaaagacaatcgtgagaagattgaaaaaatcttgacttttcgaattccttattatgttggtccattggcgcgtggcaatagtcgttttgcatggatgactcggaagtctgaagaaacaattaccccatggaattttgaagaagttgtcgataaaggtgcttcagctcaatcatttattgaacgcatgacaaactttgataaaaatcttccaaatgaaaaagtactaccaaaacatagtttgctttatgagtattttacggtttataacgaattgacaaaggtcaaatatgttactgaaggaatgcgaaaaccagcatttctttcaggtgaacagaagaaagccattgttgatttactcttcaaaacaaatcgaaaagtaaccgttaagcaattaaaagaagattatttcaaaaaaatagaatgttttgatagtgttgaaatttcaggagttgaagatagatttaatgcttcattaggtacctaccatgatttgctaaaaattattaaagataaagattttttggataatgaagaaaatgaagatatcttagaggatattgttttaacattgaccttatttgaagatagggagatgattgaggaaagacttaaaacatatgctcacctctttgatgataaggtgatgaaacagcttaaacgtcgccgttatactggttggggacgtttgtctcgaaaattgattaatggtattagggataagcaatctggcaaaacaatattagattttttgaaatcagatggttttgccaatcgcaattttatgcagctgatccatgatgatagtttgacatttaaagaagacattcaaaaagcacaagtgtctggacaaggcgatagtttacatgaacatattgcaaatttagctggtagccctgctattaaaaaaggtattttacagactgtaaaagttgttgatgaattggtcaaagtaatggggcggcataagccagaaaatatcgttattgaaatggcacgtgaaaatcagacaactcaaaagggccagaaaaattcgcgagagcgtatgaaacgaatcgaagaaggtatcaaagaattaggaagtcagattcttaaagagcatcctgttgaaaatactcaattgcaaaatgaaaagctctatctctattatctccaaaatggaagagacatgtatgtggaccaagaattagatattaatcgtttaagtgattatgatgtcgatcacattgttccacaaagtttccttaaagacgattcaatagacaataaggtcttaacgcgttctgataaaaatcgtggtaaatcggataacgttccaagtgaagaagtagtcaaaaagatgaaaaactattggagacaacttctaaacgccaagttaatcactcaacgtaagtttgataatttaacgaaagctgaacgtggaggtttgagtgaacttgataaagctggttttatcaaacgccaattggttgaaactcgccaaatcactaagcatgtggcacaaattttggatagtcgcatgaatactaaatacgatgaaaatgataaacttattcgagaggttaaagtgattaccttaaaatctaaattagtttctgacttccgaaaagatttccaattctataaagtacgtgagattaacaattaccatcatgcccatgatgcgtatctaaatgccgtcgttggaactgctttgattaagaaatatccaaaacttgaatcggagtttgtctatggtgattataaagtttatgatgttcgtaaaatgattgctaagtctgagcaagaaataggcaaagcaaccgcaaaatatttcttttactctaatatcatgaacttcttcaaaacagaaattacacttgcaaatggagagattcgcaaacgccctctaatcgaaactaatggggaaactggagaaattgtctgggataaagggcgagattttgccacagtgcgcaaagtattgtccatgccccaagtcaatattgtcaagaaaacagaagtacagacaggcggattctccaaggagtcaattttaccaaaaagaaattcggacaagcttattgctcgtaaaaaagactgggatccaaaaaaatatggtggttttgatagtccaacggtagcttattcagtcctagtggttgctaaggtggaaaaagggaaatcgaagaagttaaaatccgttaaagagttactagggatcacaattatggaaagaagttcctttgaaaaaaatccgattgactttttagaagctaaaggatataaggaagttaaaaaagacttaatcattaaactacctaaatatagtctttttgagttagaaaacggtcgtaaacggatgctggctagtgccggagaattacaaaaaggaaatgagctggctctgccaagcaaatatgtgaattttttatatttagctagtcattatgaaaagttgaagggtagtccagaagataacgaacaaaaacaattgtttgtggagcagcataagcattatttagatgagattattgagcaaatcagtgaattttctaagcgtgttattttagcagatgccaatttagataaagttcttagtgcatataacaaacatagagacaaaccaatacgtgaacaagcagaaaatattattcatttatttacgttgacgaatcttggagctcccgctgcttttaaatattttgatacaacaattgatcgtaaacgatatacgtctacaaaagaagttttagatgccactcttatccatcaatccatcactggtctttatgaaacacgcattgatttgagtcagctaggaggtgactga

SEQ ID NO: 203 - protein, 1368 aa, synthetic construct
  REGION 1..1368: note = catalytically inactive Cas9 (dCas9)polypeptide sequence
  REGION 5..58: note = MISC_FEATURE - RuvC domain
  REGION 718..764: note = MISC_FEATURE - RuvC domain
  REGION 773..902: note = MISC_FEATURE - HNH domain
  REGION 907..1102: note = MISC_FEATURE - RuvC domain
MDKKYSIGLAIGTNSVGWAVITDEYKVPSKKFKVLGNTDRHSIKKNLIGALLFDSGETAEATRLKRTARRRYTRRKNRICYLQEIFSNEMAKVDDSFFHRLEESFLVEEDKKHERHPIFGNIVDEVAYHEKYPTIYHLRKKLVDSTDKADLRLIYLALAHMIKFRGHFLIEGDLNPDNSDVDKLFIQLVQTYNQLFEENPINASGVDAKAILSARLSKSRRLENLIAQLPGEKKNGLFGNLIALSLGLTPNFKSNFDLAEDAKLQLSKDTYDDDLDNLLAQIGDQYADLFLAAKNLSDAILLSDILRVNTEITKAPLSASMIKRYDEHHQDLTLLKALVRQQLPEKYKEIFFDQSKNGYAGYIDGGASQEEFYKFIKPILEKMDGTEELLVKLNREDLLRKQRTFDNGSIPHQIHLGELHAILRRQEDFYPFLKDNREKIEKILTFRIPYYVGPLARGNSRFAWMTRKSEETITPWNFEEVVDKGASAQSFIERMTNFDKNLPNEKVLPKHSLLYEYFTVYNELTKVKYVTEGMRKPAFLSGEQKKAIVDLLFKTNRKVTVKQLKEDYFKKIECFDSVEISGVEDRFNASLGTYHDLLKIIKDKDFLDNEENEDILEDIVLTLTLFEDREMIEERLKTYAHLFDDKVMKQLKRRRYTGWGRLSRKLINGIRDKQSGKTILDFLKSDGFANRNFMQLIHDDSLTFKEDIQKAQVSGQGDSLHEHIANLAGSPAIKKGILQTVKVVDELVKVMGRHKPENIVIEMARENQTTQKGQKNSRERMKRIEEGIKELGSQILKEHPVENTQLQNEKLYLYYLQNGRDMYVDQELDINRLSDYDVDAIVPQSFLKDDSIDNKVLTRSDKNRGKSDNVPSEEVVKKMKNYWRQLLNAKLITQRKFDNLTKAERGGLSELDKAGFIKRQLVETRQITKHVAQILDSRMNTKYDENDKLIREVKVITLKSKLVSDFRKDFQFYKVREINNYHHAHDAYLNAVVGTALIKKYPKLESEFVYGDYKVYDVRKMIAKSEQEIGKATAKYFFYSNIMNFFKTEITLANGEIRKRPLIETNGETGEIVWDKGRDFATVRKVLSMPQVNIVKKTEVQTGGFSKESILPKRNSDKLIARKKDWDPKKYGGFDSPTVAYSVLVVAKVEKGKSKKLKSVKELLGITIMERSSFEKNPIDFLEAKGYKEVKKDLIIKLPKYSLFELENGRKRMLASAGELQKGNELALPSKYVNFLYLASHYEKLKGSPEDNEQKQLFVEQHKHYLDEIIEQISEFSKRVILADANLDKVLSAYNKHRDKPIREQAENIIHLFTLTNLGAPAAFKYFDTTIDRKRYTSTKEVLDATLIHQSITGLYETRIDLSQLGGD

SEQ ID NO: 204 - protein, 345 aa, Sulfolobus islandicus
  REGION 1..345: note = MISC_FEATURE - tr|F0NN87|F0NN87_SULIHCRISPR-associatedCasx protein OS =Sulfolobus islandicus (strain HVE10/4) GN = SiH_0402 PE=4; SV = 1);CasX polypeptide sequence
MEVPLYNIFGDNYIIQVATEAENSTIYNNKVEIDDEELRNVLNLAYKIAKNNEDAAAERRGKAKKKKGEEGETTTSNIILPLSGNDKNPWTETLKCYNFPTTVALSEVFKNFSQVKECEEVSAPSFVKPEFYEFGRSPGMVERTRRVKLEVEPHYLIIAAAGWVLTRLGKAKVSEGDYVGVNVFTPTRGILYSLIQNVNGIVPGIKPETAFGLWIARKVVSSVTNPNVSVVRIYTISDAVGQNPTTINGGFSIDLTKLLEKRYLLSERLEAIARNALSISSNMRERYIVLANYIYEYLTGSKRLEDLLYFANRDLIMNLNSDDGKVRDLKLISAYVNGELIRGEG

SEQ ID NO: 205 - protein, 345 aa, Sulfolobus islandicus
  REGION 1..345: note = MISC_FEATURE - tr|F0NH53|F0NH53_SULIR CRISPR associated protein, Casx OS =Sulfolobus islandicus (strain REY15A) GN=SiRe_0771 PE=4 SV=1);CasX polypeptide sequence
MEVPLYNIFGDNYIIQVATEAENSTIYNNKVEIDDEELRNVLNLAYKIAKNNEDAAAERRGKAKKKKGEEGETTTSNIILPLSGNDKNPWTETLKCYNFPTTVALSEVFKNFSQVKECEEVSAPSFVKPEFYKFGRSPGMVERTRRVKLEVEPHYLIMAAAGWVLTRLGKAKVSEGDYVGVNVFTPTRGILYSLIQNVNGIVPGIKPETAFGLWIARKVVSSVTNPNVSVVSIYTISDAVGQNPTTINGGFSIDLTKLLEKRDLLSERLEAIARNALSISSNMRERYIVLANYIYEYLTGSKRLEDLLYFANRDLIMNLNSDDGKVRDLKLISAYVNGELIRGEG

SEQ ID NO: 206 - protein, 987 aa, unidentified
  REGION 1..987: note = MISC_FEATURE - CasX polypeptide sequence
MEKRINKIRKKLSADNATKPVSRSGPMKTLLVRVMTDDLKKRLEKRRKKPEVMPQVISNNAANNLRMLLDDYTKMKEAILQVYWQEFKDDHVGLMCKFAQPASKKIDQNKLKPEMDEKGNLTTAGFACSQCGQPLFVYKLEQVSEKGKAYTNYFGRCNVAEHEKLILLAQLKPVKDSDEAVTYSLGKFGQRALDFYSIHVTKESTHPVKPLAQIAGNRYASGPVGKALSDACMGTIASFLSKYQDIIIEHQKVVKGNQKRLESLRELAGKENLEYPSVTLPPQPHTKEGVDFAYNEVIARVRMWVNLNLWQKLKLSRDDAKPLLRLKGFPSFPVVERRENEVDWWNTINEVKKLIDAKRDMGRVFWSGVTAEKRNTILEGYNYLPNENDHKKREGSLENPKKPAKRQFGDLLLYLEKKYAGDWGKVFDEAWERIDKKIAGLTSHIEREEARNAEDAQSKAVLTDWLRAKASFVLERLKEMDEKEFYACEIQLQKWYGDLRGNPFAVEAENRVVDISGFSIGSDGHSIQYRNLLAWKYLENGKREFYLLMNYGKKGRIRFTDGTDIKKSGKWQGLLYGGGKAKVIDLTFDPDDEQLIILPLAFGTRQGREFIWNDLLSLETGLIKLANGRVIEKTIYNKKIGRDEPALFVALTFERREVVDPSNIKPVNLIGVARGENIPAVIALTDPEGCPLPEFKDSSGGPTDILRIGEGYKEKQRAIQAAKEVEQRRAGGYSRKFASKSRNLADDMVRNSARDLFYHAVTHDAVLVFANLSRGFGRQGKRTFMTERQYTKMEDWLTAKLAYEGLTSKTYLSKTLAQYTSKTCSNCGFTITYADMDVMLVRLKKTSDGWATTLNNKELKAEYQITYYNRYKRQTVEKELSAELDRLSEESGNNDISKWTKGRRDEALFLLKKRFSHRPVQEQFVCLDCGHEVHAAEQAALNIARSWLFLNSNSTEFKSYKSGKQPFVGAWQAFYKRRLKEVWKPNA

SEQ ID NO: 207 - protein, 1210 aa, unidentified
  REGION 1..1210: note = MISC_FEATURE - APG80656.1 CRISPR-associated protein CasY [uncultured Parcubacteria group bacterium]; CasY polypeptide sequence
MSKRHPRISGVKGYRLHAQRLEYTGKSGAMRTIKYPLYSSPSGGRTVPREIVSAINDDYVGLYGLSNFDDLYNAEKRNEEKVYSVLDFWYDCVQYGAVFSYTAPGLLKNVAEVRGGSYELTKTLKGSHLYDELQIDKVIKFLNKKEISRANGSLDKLKKDIIDCFKAEYRERHKDQCNKLADDIKNAKKDAGASLGERQKKLFRDFFGISEQSENDKPSFTNPLNLTCCLLPFDTVNNNRNRGEVLFNKLKEYAQKLDKNEGSLEMWEYIGIGNSGTAFSNFLGEGFLGRLRENKITELKKAMMDITDAWRGQEQEEELEKRLRILAALTIKLREPKFDNHWGGYRSDINGKLSSWLQNYINQTVKIKEDLKGHKKDLKKAKEMINRFGESDTKEEAVVSSLLESIEKIVPDDSADDEKPDIPAIAIYRRFLSDGRLTLNRFVQREDVQEALIKERLEAEKKKKPKKRKKKSDAEDEKETIDFKELFPHLAKPLKLVPNFYGDSKRELYKKYKNAAIYTDALWKAVEKIYKSAFSSSLKNSFFDTDFDKDFFIKRLQKIFSVYRRFNTDKWKPIVKNSFAPYCDIVSLAENEVLYKPKQSRSRKSAAIDKNRVRLPSTENIAKAGIALARELSVAGFDWKDLLKKEEHEEYIDLIELHKTALALLLAVTETQLDISALDFVENGTVKDFMKTRDGNLVLEGRFLEMFSQSIVFSELRGLAGLMSRKEFITRSAIQTMNGKQAELLYIPHEFQSAKITTPKEMSRAFLDLAPAEFATSLEPESLSEKSLLKLKQMRYYPHYFGYELTRTGQGIDGGVAENALRLEKSPVKKREIKCKQYKTLGRGQNKIVLYVRSSYYQTQFLEWFLHRPKNVQTDVAVSGSFLIDEKKVKTRWNYDALTVALEPVSGSERVFVSQPFTIFPEKSAEEEGQRYLGIDIGEYGIAYTALEITGDSAKILDQNFISDPQLKTLREEVKGLKLDQRRGTFAMPSTKIARIRESLVHSLRNRIHHLALKHKAKIVYELEVSRFEEGKQKIKKVYATLKKADVYSEIDADKNLQTTVWGKLAVASEISASYTSQFCGACKKLWRAEMQVDETITTQELIGTVRVIKGGTLIDAIKDFMRPPIFDENDTPFPKYRDFCDKHHISKKMRGNSCLFICPFCRANADADIQASQTIALLRYVKEEKKVEDYFERFRKLKNIKVLGQMKKI

SEQ ID NO: 208 - protein, 1082 aa, Neisseria meningitidis
  REGION 1..1082: note = MISC_FEATURE - NCBI Reference: WP_002235162.1; type II CRISPR RNA-guided endonuclease Cas9; Nme1Cas9 polypeptide sequence
MAAFKPNPINYILGLDIGIASVGWAMVEIDEDENPICLIDLGVRVFERAEVPKTGDSLAMARRLARSVRRLTRRRAHRLLRARRLLKREGVLQAADFDENGLIKSLPNTPWQLRAAALDRKLTPLEWSAVLLHLIKHRGYLSQRKNEGETADKELGALLKGVADNAHALQTGDFRTPAELALNKFEKESGHIRNQRGDYSHTFSRKDLQAELILLFEKQKEFGNPHVSGGLKEGIETLLMTQRPALSGDAVQKMLGHCTFEPAEPKAAKNTYTAERFIWLTKLNNLRILEQGSERPLTDTERATLMDEPYRKSKLTYAQARKLLGLEDTAFFKGLRYGKDNAEASTLMEMKAYHAISRALEKEGLKDKKSPLNLSPELQDEIGTAFSLFKTDEDITGRLKDRIQPEILEALLKHISFDKFVQISLKALRRIVPLMEQGKRYDEACAEIYGDHYGKKNTEEKIYLPPIPADEIRNPVVLRALSQARKVINGVVRRYGSPARIHIETAREVGKSFKDRKEIEKRQEENRKDREKAAAKFREYFPNFVGEPKSKDILKLRLYEQQHGKCLYSGKEINLGRLNEKGYVEIDHALPFSRTWDDSFNNKVLVLGSENQNKGNQTPYEYFNGKDNSREWQEFKARVETSRFPRSKKQRILLQKFDEDGFKERNLNDTRYVNRFLCQFVADRMRLTGKGKKRVFASNGQITNLLRGFWGLRKVRAENDRHHALDAVVVACSTVAMQQKITRFVRYKEMNAFDGKTIDKETGEVLHQKTHFPQPWEFFAQEVMIRVFGKPDGKPEFEEADTPEKLRTLLAEKLSSRPEAVHEYVTPLFVSRAPNRKMSGQGHMETVKSAKRLDEGVSVLRVPLTQLKLKDLEKMVNREREPKLYEALKARLEAHKDDPAKAFAEPFYKYDKAGNRTQQVKAVRVEQVQKTGVWVRNHNGIADNATMVRVDVFEKGDKYYLVPIYSWQVAKGILPDRAVVQGKDEEDWQLIDDSFNFKFSLHPNDLVEVITKKARMFGYFASCHRGTGNINIRIHDLDHKIGKNGILEGIGVKTALSFQKYQIDELGKEIRPCRLKKRPPVR

SEQ ID NO: 209 - protein, 1082 aa, Neisseria meningitidis
  REGION 1..1082: note = MISC_FEATURE - NCBI Reference: WP_002230835; type II CRISPR RNA-guided endonuclease Cas9; Nme2Cas9 polypeptide sequence
MAAFKPNPINYILGLDIGIASVGWAMVEIDEEENPIRLIDLGVRVFERAEVPKTGDSLAMARRLARSVRRLTRRRAHRLLRARRLLKREGVLQAADFDENGLIKSLPNTPWQLRAAALDRKLTPLEWSAVLLHLIKHRGYLSQRKNEGETADKELGALLKGVANNAHALQTGDFRTPAELALNKFEKESGHIRNQRGDYSHTFSRKDLQAELILLFEKQKEFGNPHVSGGLKEGIETLLMTQRPALSGDAVQKMLGHCTFEPAEPKAAKNTYTAERFIWLTKLNNLRILEQGSERPLTDTERATLMDEPYRKSKLTYAQARKLLGLEDTAFFKGLRYGKDNAEASTLMEMKAYHAISRALEKEGLKDKKSPLNLSSELQDEIGTAFSLFKTDEDITGRLKDRVQPEILEALLKHISFDKFVQISLKALRRIVPLMEQGKRYDEACAEIYGDHYGKKNTEEKIYLPPIPADEIRNPVVLRALSQARKVINGVVRRYGSPARIHIETAREVGKSFKDRKEIEKRQEENRKDREKAAAKFREYFPNFVGEPKSKDILKLRLYEQQHGKCLYSGKEINLVRLNEKGYVEIDHALPFSRTWDDSFNNKVLVLGSENQNKGNQTPYEYFNGKDNSREWQEFKARVETSRFPRSKKQRILLQKFDEDGFKECNLNDTRYVNRFLCQFVADHILLTGKGKRRVFASNGQITNLLRGFWGLRKVRAENDRHHALDAVVVACSTVAMQQKITRFVRYKEMNAFDGKTIDKETGKVLHQKTHFPQPWEFFAQEVMIRVFGKPDGKPEFEEADTPEKLRTLLAEKLSSRPEAVHEYVTPLFVSRAPNRKMSGAHKDTLRSAKRFVKHNEKISVKRVWLTEIKLADLENMVNYKNGREIELYEALKARLEAYGGNAKQAFDPKDNPFYKKGGQLVKAVRVEKTQESGVLLNKKNAYTIADNGDMVRVDVFCKVDKKGKNQYFIVPIYAWQVAENILPDIDCKGYRIDDSYTFCFSLHKYDLIAFQKDEKSKVEFAYYINCDSSNGRFYLAWHDKGSKEQQFRISTQNLVLIQKYQVNELGKEIRPCRLKKRPPVR

SEQ ID NO: 210 - protein, 1300 aa, Francisella tularensis
  REGION 1..1300: note = MISC_FEATURE - wild type Cpf1 polypeptide sequence
  source 1..1300: note = subspecies novicida
MSIYQEFVNKYSLSKTLRFELIPQGKTLENIKARGLILDDEKRAKDYKKAKQIIDKYHQFFIEEILSSVCISEDLLQNYSDVYFKLKKSDDDNLQKDFKSAKDTIKKQISEYIKDSEKFKNLFNQNLIDAKKGQESDLILWLKQSKDNGIELFKANSDITDIDEALEIIKSFKGWTTYFKGFHENRKNVYSSNDIPTSIIYRIVDDNLPKFLENKAKYESLKDKAPEAINYEQIKKDLAEELTFDIDYKTSEVNQRVFSLDEVFEIANFNNYLNQSGITKFNTIIGGKFVNGENTKRKGINEYINLYSQQINDKTLKKYKMSVLFKQILSDTESKSFVIDKLEDDSDVVTTMQSFYEQIAAFKTVEEKSIKETLSLLFDDLKAQKLDLSKIYFKNDKSLTDLSQQVFDDYSVIGTAVLEYITQQIAPKNLDNPSKKEQELIAKKTEKAKYLSLETIKLALEEFNKHRDIDKQCRFEEILANFAAIPMIFDEIAQNKDNLAQISIKYQNQGKKDLLQASAEDDVKAIKDLLDQTNNLLHKLKIFHISQSEDKANILDKDEHFYLVFEECYFELANIVPLYNKIRNYITQKPYSDEKFKLNFENSTLANGWDKNKEPDNTAILFIKDDKYYLGVMNKKNNKIFDDKAIKENKGEGYKKIVYKLLPGANKMLPKVFFSAKSIKFYNPSEDILRIRNHSTHTKNGSPQKGYEKFEFNIEDCRKFIDFYKQSISKHPEWKDFGFRFSDTQRYNSIDEFYREVENQGYKLTFENISESYIDSVVNQGKLYLFQIYNKDFSAYSKGRPNLHTLYWKALFDERNLQDVVYKLNGEAELFYRKQSIPKKITHPAKEAIANKNKDNPKKESVFEYDLIKDKRFTEDKFFFHCPITINFKSSGANKFNDEINLLLKEKANDVHILSIDRGERHLAYYTLVDGKGNIIKQDTFNIIGNDRMKTNYHDKLAAIEKDRDSARKDWKKINNIKEMKEGYLSQVVHEIAKLVIEYNAIVVFEDLNFGFKRGRFKVEKQVYQKLEKMLIEKLNYLVFKDNEFDKTGGVLRAYQLTAPFETFKKMGKQTGIIYYVPAGFTSKICPVTGFVNQLYPKYESVSKSQEFFSKFDKICYNLDKGYFEFSFDYKNFGDKAAKGKWTIASFGSRLINFRNSDKNHNWDTREVYPTKELEKLLKDYSIEYGHGECIKAAICGESDKKFFAKLTSVLNTILQMRNSKTGTELDYLISPVADVNGNFFDSRQAPKNMPQDADANGAYHIGLKGLMLLGRIKNNQEGKKLNLVIKNEEYFEFVQNRNN

SEQ ID NO: 211 - protein, 1300 aa, Francisella tularensis
  REGION 1..1300: note = MISC_FEATURE - Cpf1 D917A polypeptide sequence
  source 1..1300: note = subspecies novicida
MSIYQEFVNKYSLSKTLRFELIPQGKTLENIKARGLILDDEKRAKDYKKAKQIIDKYHQFFIEEILSSVCISEDLLQNYSDVYFKLKKSDDDNLQKDFKSAKDTIKKQISEYIKDSEKFKNLFNQNLIDAKKGQESDLILWLKQSKDNGIELFKANSDITDIDEALEIIKSFKGWTTYFKGFHENRKNVYSSNDIPTSIIYRIVDDNLPKFLENKAKYESLKDKAPEAINYEQIKKDLAEELTFDIDYKTSEVNQRVFSLDEVFEIANFNNYLNQSGITKFNTIIGGKFVNGENTKRKGINEYINLYSQQINDKTLKKYKMSVLFKQILSDTESKSFVIDKLEDDSDVVTTMQSFYEQIAAFKTVEEKSIKETLSLLFDDLKAQKLDLSKIYFKNDKSLTDLSQQVFDDYSVIGTAVLEYITQQIAPKNLDNPSKKEQELIAKKTEKAKYLSLETIKLALEEFNKHRDIDKQCRFEEILANFAAIPMIFDEIAQNKDNLAQISIKYQNQGKKDLLQASAEDDVKAIKDLLDQTNNLLHKLKIFHISQSEDKANILDKDEHFYLVFEECYFELANIVPLYNKIRNYITQKPYSDEKFKLNFENSTLANGWDKNKEPDNTAILFIKDDKYYLGVMNKKNNKIFDDKAIKENKGEGYKKIVYKLLPGANKMLPKVFFSAKSIKFYNPSEDILRIRNHSTHTKNGSPQKGYEKFEFNIEDCRKFIDFYKQSISKHPEWKDFGFRFSDTQRYNSIDEFYREVENQGYKLTFENISESYIDSVVNQGKLYLFQIYNKDFSAYSKGRPNLHTLYWKALFDERNLQDVVYKLNGEAELFYRKQSIPKKITHPAKEAIANKNKDNPKKESVFEYDLIKDKRFTEDKFFFHCPITINFKSSGANKFNDEINLLLKEKANDVHILSIARGERHLAYYTLVDGKGNIIKQDTFNIIGNDRMKTNYHDKLAAIEKDRDSARKDWKKINNIKEMKEGYLSQVVHEIAKLVIEYNAIVVFEDLNFGFKRGRFKVEKQVYQKLEKMLIEKLNYLVFKDNEFDKTGGVLRAYQLTAPFETFKKMGKQTGIIYYVPAGFTSKICPVTGFVNQLYPKYESVSKSQEFFSKFDKICYNLDKGYFEFSFDYKNFGDKAAKGKWTIASFGSRLINFRNSDKNHNWDTREVYPTKELEKLLKDYSIEYGHGECIKAAICGESDKKFFAKLTSVLNTILQMRNSKTGTELDYLISPVADVNGNFFDSRQAPKNMPQDADANGAYHIGLKGLMLLGRIKNNQEGKKLNLVIKNEEYFEFVQNRNN

SEQ ID NO: 212 - protein, 1300 aa, Francisella tularensis
  REGION 1..1300: note = MISC_FEATURE - Cpf1 E1006A polypeptide sequence
  source 1..1300: note = subspecies novicida
MSIYQEFVNKYSLSKTLRFELIPQGKTLENIKARGLILDDEKRAKDYKKAKQIIDKYHQFFIEEILSSVCISEDLLQNYSDVYFKLKKSDDDNLQKDFKSAKDTIKKQISEYIKDSEKFKNLFNQNLIDAKKGQESDLILWLKQSKDNGIELFKANSDITDIDEALEIIKSFKGWTTYFKGFHENRKNVYSSNDIPTSIIYRIVDDNLPKFLENKAKYESLKDKAPEAINYEQIKKDLAEELTFDIDYKTSEVNQRVFSLDEVFEIANFNNYLNQSGITKFNTIIGGKFVNGENTKRKGINEYINLYSQQINDKTLKKYKMSVLFKQILSDTESKSFVIDKLEDDSDVVTTMQSFYEQIAAFKTVEEKSIKETLSLLFDDLKAQKLDLSKIYFKNDKSLTDLSQQVFDDYSVIGTAVLEYITQQIAPKNLDNPSKKEQELIAKKTEKAKYLSLETIKLALEEFNKHRDIDKQCRFEEILANFAAIPMIFDEIAQNKDNLAQISIKYQNQGKKDLLQASAEDDVKAIKDLLDQTNNLLHKLKIFHISQSEDKANILDKDEHFYLVFEECYFELANIVPLYNKIRNYITQKPYSDEKFKLNFENSTLANGWDKNKEPDNTAILFIKDDKYYLGVMNKKNNKIFDDKAIKENKGEGYKKIVYKLLPGANKMLPKVFFSAKSIKFYNPSEDILRIRNHSTHTKNGSPQKGYEKFEFNIEDCRKFIDFYKQSISKHPEWKDFGFRFSDTQRYNSIDEFYREVENQGYKLTFENISESYIDSVVNQGKLYLFQIYNKDFSAYSKGRPNLHTLYWKALFDERNLQDVVYKLNGEAELFYRKQSIPKKITHPAKEAIANKNKDNPKKESVFEYDLIKDKRFTEDKFFFHCPITINFKSSGANKFNDEINLLLKEKANDVHILSIDRGERHLAYYTLVDGKGNIIKQDTFNIIGNDRMKTNYHDKLAAIEKDRDSARKDWKKINNIKEMKEGYLSQVVHEIAKLVIEYNAIVVFADLNFGFKRGRFKVEKQVYQKLEKMLIEKLNYLVFKDNEFDKTGGVLRAYQLTAPFETFKKMGKQTGIIYYVPAGFTSKICPVTGFVNQLYPKYESVSKSQEFFSKFDKICYNLDKGYFEFSFDYKNFGDKAAKGKWTIASFGSRLINFRNSDKNHNWDTREVYPTKELEKLLKDYSIEYGHGECIKAAICGESDKKFFAKLTSVLNTILQMRNSKTGTELDYLISPVADVNGNFFDSRQAPKNMPQDADANGAYHIGLKGLMLLGRIKNNQEGKKLNLVIKNEEYFEFVQNRNN

SEQ ID NO: 213 - protein, 1300 aa, Francisella tularensis
  REGION 1..1300: note = MISC_FEATURE - Cpf1 D1255A polypeptide sequence
MSIYQEFVNKYSLSKTLRFELIPQGKTLENIKARGLILDDEKRAKDYKKAKQIIDKYHQFFIEEILSSVCISEDLLQNYSDVYFKLKKSDDDNLQKDFKSAKDTIKKQISEYIKDSEKFKNLFNQNLIDAKKGQESDLILWLKQSKDNGIELFKANSDITDIDEALEIIKSFKGWTTYFKGFHENRKNVYSSNDIPTSIIYRIVDDNLPKFLENKAKYESLKDKAPEAINYEQIKKDLAEELTFDIDYKTSEVNQRVFSLDEVFEIANFNNYLNQSGITKFNTIIGGKFVNGENTKRKGINEYINLYSQQINDKTLKKYKMSVLFKQILSDTESKSFVIDKLEDDSDVVTTMQSFYEQIAAFKTVEEKSIKETLSLLFDDLKAQKLDLSKIYFKNDKSLTDLSQQVFDDYSVIGTAVLEYITQQIAPKNLDNPSKKEQELIAKKTEKAKYLSLETIKLALEEFNKHRDIDKQCRFEEILANFAAIPMIFDEIAQNKDNLAQISIKYQNQGKKDLLQASAEDDVKAIKDLLDQTNNLLHKLKIFHISQSEDKANILDKDEHFYLVFEECYFELANIVPLYNKIRNYITQKPYSDEKFKLNFENSTLANGWDKNKEPDNTAILFIKDDKYYLGVMNKKNNKIFDDKAIKENKGEGYKKIVYKLLPGANKMLPKVFFSAKSIKFYNPSEDILRIRNHSTHTKNGSPQKGYEKFEFNIEDCRKFIDFYKQSISKHPEWKDFGFRFSDTQRYNSIDEFYREVENQGYKLTFENISESYIDSVVNQGKLYLFQIYNKDFSAYSKGRPNLHTLYWKALFDERNLQDVVYKLNGEAELFYRKQSIPKKITHPAKEAIANKNKDNPKKESVFEYDLIKDKRFTEDKFFFHCPITINFKSSGANKFNDEINLLLKEKANDVHILSIDRGERHLAYYTLVDGKGNIIKQDTFNIIGNDRMKTNYHDKLAAIEKDRDSARKDWKKINNIKEMKEGYLSQVVHEIAKLVIEYNAIVVFEDLNFGFKRGRFKVEKQVYQKLEKMLIEKLNYLVFKDNEFDKTGGVLRAYQLTAPFETFKKMGKQTGIIYYVPAGFTSKICPVTGFVNQLYPKYESVSKSQEFFSKFDKICYNLDKGYFEFSFDYKNFGDKAAKGKWTIASFGSRLINFRNSDKNHNWDTREVYPTKELEKLLKDYSIEYGHGECIKAAICGESDKKFFAKLTSVLNTILQMRNSKTGTELDYLISPVADVNGNFFDSRQAPKNMPQDAAANGAYHIGLKGLMLLGRIKNNQEGKKLNLVIKNEEYFEFVQNRNN

SEQ ID NO: 214 - protein, 1300 aa, Francisella tularensis
  REGION 1..1300: note = MISC_FEATURE - Cpf1 D917A/E1006A polypeptide sequence
  source 1..1300: note = subspecies novicida
MSIYQEFVNKYSLSKTLRFELIPQGKTLENIKARGLILDDEKRAKDYKKAKQIIDKYHQFFIEEILSSVCISEDLLQNYSDVYFKLKKSDDDNLQKDFKSAKDTIKKQISEYIKDSEKFKNLFNQNLIDAKKGQESDLILWLKQSKDNGIELFKANSDITDIDEALEIIKSFKGWTTYFKGFHENRKNVYSSNDIPTSIIYRIVDDNLPKFLENKAKYESLKDKAPEAINYEQIKKDLAEELTFDIDYKTSEVNQRVFSLDEVFEIANFNNYLNQSGITKFNTIIGGKFVNGENTKRKGINEYINLYSQQINDKTLKKYKMSVLFKQILSDTESKSFVIDKLEDDSDVVTTMQSFYEQIAAFKTVEEKSIKETLSLLFDDLKAQKLDLSKIYFKNDKSLTDLSQQVFDDYSVIGTAVLEYITQQIAPKNLDNPSKKEQELIAKKTEKAKYLSLETIKLALEEFNKHRDIDKQCRFEEILANFAAIPMIFDEIAQNKDNLAQISIKYQNQGKKDLLQASAEDDVKAIKDLLDQTNNLLHKLKIFHISQSEDKANILDKDEHFYLVFEECYFELANIVPLYNKIRNYITQKPYSDEKFKLNFENSTLANGWDKNKEPDNTAILFIKDDKYYLGVMNKKNNKIFDDKAIKENKGEGYKKIVYKLLPGANKMLPKVFFSAKSIKFYNPSEDILRIRNHSTHTKNGSPQKGYEKFEFNIEDCRKFIDFYKQSISKHPEWKDFGFRFSDTQRYNSIDEFYREVENQGYKLTFENISESYIDSVVNQGKLYLFQIYNKDFSAYSKGRPNLHTLYWKALFDERNLQDVVYKLNGEAELFYRKQSIPKKITHPAKEAIANKNKDNPKKESVFEYDLIKDKRFTEDKFFFHCPITINFKSSGANKFNDEINLLLKEKANDVHILSIARGERHLAYYTLVDGKGNIIKQDTFNIIGNDRMKTNYHDKLAAIEKDRDSARKDWKKINNIKEMKEGYLSQVVHEIAKLVIEYNAIVVFADLNFGFKRGRFKVEKQVYQKLEKMLIEKLNYLVFKDNEFDKTGGVLRAYQLTAPFETFKKMGKQTGIIYYVPAGFTSKICPVTGFVNQLYPKYESVSKSQEFFSKFDKICYNLDKGYFEFSFDYKNFGDKAAKGKWTIASFGSRLINFRNSDKNHNWDTREVYPTKELEKLLKDYSIEYGHGECIKAAICGESDKKFFAKLTSVLNTILQMRNSKTGTELDYLISPVADVNGNFFDSRQAPKNMPQDADANGAYHIGLKGLMLLGRIKNNQEGKKLNLVIKNEEYFEFVQNRNN

SEQ ID NO: 215 - protein, 1300 aa, Francisella tularensis
  REGION 1..1300: note = MISC_FEATURE - Cpf1 D917A/D1255A polypeptide sequence
  source 1..1300: note = subspecies novicida
MSIYQEFVNKYSLSKTLRFELIPQGKTLENIKARGLILDDEKRAKDYKKAKQIIDKYHQFFIEEILSSVCISEDLLQNYSDVYFKLKKSDDDNLQKDFKSAKDTIKKQISEYIKDSEKFKNLFNQNLIDAKKGQESDLILWLKQSKDNGIELFKANSDITDIDEALEIIKSFKGWTTYFKGFHENRKNVYSSNDIPTSIIYRIVDDNLPKFLENKAKYESLKDKAPEAINYEQIKKDLAEELTFDIDYKTSEVNQRVFSLDEVFEIANFNNYLNQSGITKFNTIIGGKFVNGENTKRKGINEYINLYSQQINDKTLKKYKMSVLFKQILSDTESKSFVIDKLEDDSDVVTTMQSFYEQIAAFKTVEEKSIKETLSLLFDDLKAQKLDLSKIYFKNDKSLTDLSQQVFDDYSVIGTAVLEYITQQIAPKNLDNPSKKEQELIAKKTEKAKYLSLETIKLALEEFNKHRDIDKQCRFEEILANFAAIPMIFDEIAQNKDNLAQISIKYQNQGKKDLLQASAEDDVKAIKDLLDQTNNLLHKLKIFHISQSEDKANILDKDEHFYLVFEECYFELANIVPLYNKIRNYITQKPYSDEKFKLNFENSTLANGWDKNKEPDNTAILFIKDDKYYLGVMNKKNNKIFDDKAIKENKGEGYKKIVYKLLPGANKMLPKVFFSAKSIKFYNPSEDILRIRNHSTHTKNGSPQKGYEKFEFNIEDCRKFIDFYKQSISKHPEWKDFGFRFSDTQRYNSIDEFYREVENQGYKLTFENISESYIDSVVNQGKLYLFQIYNKDFSAYSKGRPNLHTLYWKALFDERNLQDVVYKLNGEAELFYRKQSIPKKITHPAKEAIANKNKDNPKKESVFEYDLIKDKRFTEDKFFFHCPITINFKSSGANKFNDEINLLLKEKANDVHILSIARGERHLAYYTLVDGKGNIIKQDTFNIIGNDRMKTNYHDKLAAIEKDRDSARKDWKKINNIKEMKEGYLSQVVHEIAKLVIEYNAIVVFEDLNFGFKRGRFKVEKQVYQKLEKMLIEKLNYLVFKDNEFDKTGGVLRAYQLTAPFETFKKMGKQTGIIYYVPAGFTSKICPVTGFVNQLYPKYESVSKSQEFFSKFDKICYNLDKGYFEFSFDYKNFGDKAAKGKWTIASFGSRLINFRNSDKNHNWDTREVYPTKELEKLLKDYSIEYGHGECIKAAICGESDKKFFAKLTSVLNTILQMRNSKTGTELDYLISPVADVNGNFFDSRQAPKNMPQDAAANGAYHIGLKGLMLLGRIKNNQEGKKLNLVIKNEEYFEFVQNRNN

SEQ ID NO: 216 - protein, 1300 aa, Francisella tularensis
  REGION 1..1300: note = MISC_FEATURE - Cpf1 E1006A/D1255A polypeptide sequence
  source 1..1300: note = subspecies novicida
MSIYQEFVNKYSLSKTLRFELIPQGKTLENIKARGLILDDEKRAKDYKKAKQIIDKYHQFFIEEILSSVCISEDLLQNYSDVYFKLKKSDDDNLQKDFKSAKDTIKKQISEYIKDSEKFKNLFNQNLIDAKKGQESDLILWLKQSKDNGIELFKANSDITDIDEALEIIKSFKGWTTYFKGFHENRKNVYSSNDIPTSIIYRIVDDNLPKFLENKAKYESLKDKAPEAINYEQIKKDLAEELTFDIDYKTSEVNQRVFSLDEVFEIANFNNYLNQSGITKFNTIIGGKFVNGENTKRKGINEYINLYSQQINDKTLKKYKMSVLFKQILSDTESKSFVIDKLEDDSDVVTTMQSFYEQIAAFKTVEEKSIKETLSLLFDDLKAQKLDLSKIYFKNDKSLTDLSQQVFDDYSVIGTAVLEYITQQIAPKNLDNPSKKEQELIAKKTEKAKYLSLETIKLALEEFNKHRDIDKQCRFEEILANFAAIPMIFDEIAQNKDNLAQISIKYQNQGKKDLLQASAEDDVKAIKDLLDQTNNLLHKLKIFHISQSEDKANILDKDEHFYLVFEECYFELANIVPLYNKIRNYITQKPYSDEKFKLNFENSTLANGWDKNKEPDNTAILFIKDDKYYLGVMNKKNNKIFDDKAIKENKGEGYKKIVYKLLPGANKMLPKVFFSAKSIKFYNPSEDILRIRNHSTHTKNGSPQKGYEKFEFNIEDCRKFIDFYKQSISKHPEWKDFGFRFSDTQRYNSIDEFYREVENQGYKLTFENISESYIDSVVNQGKLYLFQIYNKDFSAYSKGRPNLHTLYWKALFDERNLQDVVYKLNGEAELFYRKQSIPKKITHPAKEAIANKNKDNPKKESVFEYDLIKDKRFTEDKFFFHCPITINFKSSGANKFNDEINLLLKEKANDVHILSIDRGERHLAYYTLVDGKGNIIKQDTFNIIGNDRMKTNYHDKLAAIEKDRDSARKDWKKINNIKEMKEGYLSQVVHEIAKLVIEYNAIVVFADLNFGFKRGRFKVEKQVYQKLEKMLIEKLNYLVFKDNEFDKTGGVLRAYQLTAPFETFKKMGKQTGIIYYVPAGFTSKICPVTGFVNQLYPKYESVSKSQEFFSKFDKICYNLDKGYFEFSFDYKNFGDKAAKGKWTIASFGSRLINFRNSDKNHNWDTREVYPTKELEKLLKDYSIEYGHGECIKAAICGESDKKFFAKLTSVLNTILQMRNSKTGTELDYLISPVADVNGNFFDSRQAPKNMPQDAAANGAYHIGLKGLMLLGRIKNNQEGKKLNLVIKNEEYFEFVQNRNN

SEQ ID NO: 217 - protein, 1300 aa, Francisella tularensis
  REGION 1..1300: note = MISC_FEATURE - Cpf1 D917A/E1006A/D1255A polypeptide sequence
  source 1..1300: note = subspecies novicida
MSIYQEFVNKYSLSKTLRFELIPQGKTLENIKARGLILDDEKRAKDYKKAKQIIDKYHQFFIEEILSSVCISEDLLQNYSDVYFKLKKSDDDNLQKDFKSAKDTIKKQISEYIKDSEKFKNLFNQNLIDAKKGQESDLILWLKQSKDNGIELFKANSDITDIDEALEIIKSFKGWTTYFKGFHENRKNVYSSNDIPTSIIYRIVDDNLPKFLENKAKYESLKDKAPEAINYEQIKKDLAEELTFDIDYKTSEVNQRVFSLDEVFEIANFNNYLNQSGITKFNTIIGGKFVNGENTKRKGINEYINLYSQQINDKTLKKYKMSVLFKQILSDTESKSFVIDKLEDDSDVVTTMQSFYEQIAAFKTVEEKSIKETLSLLFDDLKAQKLDLSKIYFKNDKSLTDLSQQVFDDYSVIGTAVLEYITQQIAPKNLDNPSKKEQELIAKKTEKAKYLSLETIKLALEEFNKHRDIDKQCRFEEILANFAAIPMIFDEIAQNKDNLAQISIKYQNQGKKDLLQASAEDDVKAIKDLLDQTNNLLHKLKIFHISQSEDKANILDKDEHFYLVFEECYFELANIVPLYNKIRNYITQKPYSDEKFKLNFENSTLANGWDKNKEPDNTAILFIKDDKYYLGVMNKKNNKIFDDKAIKENKGEGYKKIVYKLLPGANKMLPKVFFSAKSIKFYNPSEDILRIRNHSTHTKNGSPQKGYEKFEFNIEDCRKFIDFYKQSISKHPEWKDFGFRFSDTQRYNSIDEFYREVENQGYKLTFENISESYIDSVVNQGKLYLFQIYNKDFSAYSKGRPNLHTLYWKALFDERNLQDVVYKLNGEAELFYRKQSIPKKITHPAKEAIANKNKDNPKKESVFEYDLIKDKRFTEDKFFFHCPITINFKSSGANKFNDEINLLLKEKANDVHILSIARGERHLAYYTLVDGKGNIIKQDTFNIIGNDRMKTNYHDKLAAIEKDRDSARKDWKKINNIKEMKEGYLSQVVHEIAKLVIEYNAIVVFADLNFGFKRGRFKVEKQVYQKLEKMLIEKLNYLVFKDNEFDKTGGVLRAYQLTAPFETFKKMGKQTGIIYYVPAGFTSKICPVTGFVNQLYPKYESVSKSQEFFSKFDKICYNLDKGYFEFSFDYKNFGDKAAKGKWTIASFGSRLINFRNSDKNHNWDTREVYPTKELEKLLKDYSIEYGHGECIKAAICGESDKKFFAKLTSVLNTILQMRNSKTGTELDYLISPVADVNGNFFDSRQAPKNMPQDAAANGAYHIGLKGLMLLGRIKNNQEGKKLNLVIKNEEYFEFVQNRNN

SEQ ID NO: 218 - protein, 1052 aa, Staphylococcus aureus
  REGION 1..1052: note = MISC_FEATURE - Exemplary SaCas9 polypeptide sequence
KRNYILGLDIGITSVGYGIIDYETRDVIDAGVRLFKEANVENNEGRRSKRGARRLKRRRRHRIQRVKKLLFDYNLLTDHSELSGINPYEARVKGLSQKLSEEEFSAALLHLAKRRGVHNVNEVEEDTGNELSTKEQISRNSKALEEKYVAELQLERLKKDGEVRGSINRFKTSDYVKEAKQLLKVQKAYHQLDQSFIDTYIDLLETRRTYYEGPGEGSPFGWKDIKEWYEMLMGHCTYFPEELRSVKYAYNADLYNALNDLNNLVITRDENEKLEYYEKFQIIENVFKQKKKPTLKQIAKEILVNEEDIKGYRVTSTGKPEFTNLKVYHDIKDITARKEIIENAELLDQIAKILTIYQSSEDIQEELTNLNSELTQEEIEQISNLKGYTGTHNLSLKAINLILDELWHTNDNQIAIFNRLKLVPKKVDLSQQKEIPTTLVDDFILSPVVKRSFIQSIKVINAIIKKYGLPNDIIIELAREKNSKDAQKMINEMQKRNRQTNERIEEIIRTTGKENAKYLIEKIKLHDMQEGKCLYSLEAIPLEDLLNNPFNYEVDHIIPRSVSFDNSFNNKVLVKQEENSKKGNRTPFQYLSSSDSKISYETFKKHILNLAKGKGRISKTKKEYLLEERDINRFSVQKDFINRNLVDTRYATRGLMNLLRSYFRVNNLDVKVKSINGGFTSFLRRKWKFKKERNKGYKHHAEDALIIANADFIFKEWKKLDKAKKVMENQMFEEKQAESMPEIETEQEYKEIFITPHQIKHIKDFKDYKYSHRVDKKPNRELINDTLYSTRKDDKGNTLIVNNLNGLYDKDNDKLKKLINKSPEKLLMYHHDPQTYQKLKLIMEQYGDEKNPLYKYYEETGNYLTKYSKKDNGPVIKKIKYYGNKLNAHLDITDDYPNSRNKVVKLSLKPYRFDVYLDNGVYKFVTVKNLDVIKKENYYEVNSKCYEEAKKLKKISNQAEFIASFYNNDLIKINGELYRVIGVNNDLLNRIEVNMIDITYREYLENMNDKRPPRIIKTIASKTQSIKKYSTDILGNLYEVKSKKHPQIIKKG

SEQ ID NO: 219 - protein, 1052 aa, Staphylococcus aureus
  REGION 1..1052: note = MISC_FEATURE - SaCas9n polypeptide sequence
KRNYILGLDIGITSVGYGIIDYETRDVIDAGVRLFKEANVENNEGRRSKRGARRLKRRRRHRIQRVKKLLFDYNLLTDHSELSGINPYEARVKGLSQKLSEEEFSAALLHLAKRRGVHNVNEVEEDTGNELSTKEQISRNSKALEEKYVAELQLERLKKDGEVRGSINRFKTSDYVKEAKQLLKVQKAYHQLDQSFIDTYIDLLETRRTYYEGPGEGSPFGWKDIKEWYEMLMGHCTYFPEELRSVKYAYNADLYNALNDLNNLVITRDENEKLEYYEKFQIIENVFKQKKKPTLKQIAKEILVNEEDIKGYRVTSTGKPEFTNLKVYHDIKDITARKEIIENAELLDQIAKILTIYQSSEDIQEELTNLNSELTQEEIEQISNLKGYTGTHNLSLKAINLILDELWHTNDNQIAIFNRLKLVPKKVDLSQQKEIPTTLVDDFILSPVVKRSFIQSIKVINAIIKKYGLPNDIIIELAREKNSKDAQKMINEMQKRNRQTNERIEEIIRTTGKENAKYLIEKIKLHDMQEGKCLYSLEAIPLEDLLNNPFNYEVDHIIPRSVSFDNSFNNKVLVKQEEASKKGNRTPFQYLSSSDSKISYETFKKHILNLAKGKGRISKTKKEYLLEERDINRFSVQKDFINRNLVDTRYATRGLMNLLRSYFRVNNLDVKVKSINGGFTSFLRRKWKFKKERNKGYKHHAEDALIIANADFIFKEWKKLDKAKKVMENQMFEEKQAESMPEIETEQEYKEIFITPHQIKHIKDFKDYKYSHRVDKKPNRELINDTLYSTRKDDKGNTLIVNNLNGLYDKDNDKLKKLINKSPEKLLMYHHDPQTYQKLKLIMEQYGDEKNPLYKYYEETGNYLTKYSKKDNGPVIKKIKYYGNKLNAHLDITDDYPNSRNKVVKLSLKPYRFDVYLDNGVYKFVTVKNLDVIKKENYYEVNSKCYEEAKKLKKISNQAEFIASFYNNDLIKINGELYRVIGVNNDLLNRIEVNMIDITYREYLENMNDKRPPRIIKTIASKTQSIKKYSTDILGNLYEVKSKKHPQIIKKG

SEQ ID NO: 220 - protein, 1052 aa, Staphylococcus aureus
  REGION 1..1052: note = MISC_FEATURE - SaKKH Cas9 polypeptide sequence
KRNYILGLDIGITSVGYGIIDYETRDVIDAGVRLFKEANVENNEGRRSKRGARRLKRRRRHRIQRVKKLLFDYNLLTDHSELSGINPYEARVKGLSQKLSEEEFSAALLHLAKRRGVHNVNEVEEDTGNELSTKEQISRNSKALEEKYVAELQLERLKKDGEVRGSINRFKTSDYVKEAKQLLKVQKAYHQLDQSFIDTYIDLLETRRTYYEGPGEGSPFGWKDIKEWYEMLMGHCTYFPEELRSVKYAYNADLYNALNDLNNLVITRDENEKLEYYEKFQIIENVFKQKKKPTLKQIAKEILVNEEDIKGYRVTSTGKPEFTNLKVYHDIKDITARKEIIENAELLDQIAKILTIYQSSEDIQEELTNLNSELTQEEIEQISNLKGYTGTHNLSLKAINLILDELWHTNDNQIAIFNRLKLVPKKVDLSQQKEIPTTLVDDFILSPVVKRSFIQSIKVINAIIKKYGLPNDIIIELAREKNSKDAQKMINEMQKRNRQTNERIEEIIRTTGKENAKYLIEKIKLHDMQEGKCLYSLEAIPLEDLLNNPFNYEVDHIIPRSVSFDNSFNNKVLVKQEEASKKGNRTPFQYLSSSDSKISYETFKKHILNLAKGKGRISKTKKEYLLEERDINRFSVQKDFINRNLVDTRYATRGLMNLLRSYFRVNNLDVKVKSINGGFTSFLRRKWKFKKERNKGYKHHAEDALIIANADFIFKEWKKLDKAKKVMENQMFEEKQAESMPEIETEQEYKEIFITPHQIKHIKDFKDYKYSHRVDKKPNRKLINDTLYSTRKDDKGNTLIVNNLNGLYDKDNDKLKKLINKSPEKLLMYHHDPQTYQKLKLIMEQYGDEKNPLYKYYEETGNYLTKYSKKDNGPVIKKIKYYGNKLNAHLDITDDYPNSRNKVVKLSLKPYRFDVYLDNGVYKFVTVKNLDVIKKENYYEVNSKCYEEAKKLKKISNQAEFIASFYKNDLIKINGELYRVIGVNNDLLNRIEVNMIDITYREYLENMNDKRPPHIIKTIASKTQSIKKYSTDILGNLYEVKSKKHPQIIKKG

SEQ ID NO: 221 - protein, 707 aa, synthetic construct
  REGION 1..707: note = Casphi-1 polypeptide sequence
MADTPTLFTQFLRHHLPGQRFRKDILKQAGRILANKGEDATIAFLRGKSEESPPDFQPPVKCPIIACSRPLTEWPIYQASVAIQGYVYGQSLAEFEASDPGCSKDGLLGWFDKTGVCTDYFSVQGLNLIFQNARKRYIGVQTKVTNRNEKRHKKLKRINAKRIAEGLPELTSDEPESALDETGHLIDPPGLNTNIYCYQQVSPKPLALSEVNQLPTAYAGYSTSGDDPIQPMVTKDRLSISKGQPGYIPEHQRALLSQKKHRRMRGYGLKARALLVIVRIQDDWAVIDLRSLLRNAYWRRIVQTKEPSTITKLLKLVTGDPVLDATRMVATFTYKPGIVQVRSAKCLKNKQGSKLFSERYLNETVSVTSIDLGSNNLVAVATYRLVNGNTPELLQRFTLPSHLVKDFERYKQAHDTLEDSIQKTAVASLPQGQQTEIRMWSMYGFREAQERVCQELGLADGSIPWNVMTATSTILTDLFLARGGDPKKCMFTSEPKKKKNSKQVLYKIRDRAWAKMYRTLLSKETREAWNKALWGLKRGSPDYARLSKRKEELARRCVNYTISTAEKRAQCGRTIVALEDLNIGFFHGRGKQEPGWVGLFTRKKENRWLMQALHKAFLELAHHRGYHVIEVNPAYTSQTCPVCRHCDPDNRDQHNREAFHCIGCGFRGNADLDVATHNIAMVAITGESLKRARGSVASKTPQPLAAE

SEQ ID NO: 222 - protein, 757 aa, synthetic construct
  REGION 1..757: note = Casphi-2 polypeptide sequence
MPKPAVESEFSKVLKKHFPGERFRSSYMKRGGKILAAQGEEAVVAYLQGKSEEEPPNFQPPAKCHVVTKSRDFAEWPIMKASEAIQRYIYALSTTERAACKPGKSSESHAAWFAATGVSNHGYSHVQGLNLIFDHTLGRYDGVLKKVQLRNEKARARLESINASRADEGLPEIKAEEEEVATNETGHLLQPPGINPSFYVYQTISPQAYRPRDEIVLPPEYAGYVRDPNAPIPLGVVRNRCDIQKGCPGYIPEWQREAGTAISPKTGKAVTVPGLSPKKNKRMRRYWRSEKEKAQDALLVTVRIGTDWVVIDVRGLLRNARWRTIAPKDISLNALLDLFTGDPVIDVRRNIVTFTYTLDACGTYARKWTLKGKQTKATLDKLTATQTVALVAIDLGQTNPISAGISRVTQENGALQCEPLDRFTLPDDLLKDISAYRIAWDRNEEELRARSVEALPEAQQAEVRALDGVSKETARTQLCADFGLDPKRLPWDKMSSNTTFISEALLSNSVSRDQVFFTPAPKKGAKKKAPVEVMRKDRTWARAYKPRLSVEAQKLKNEALWALKRTSPEYLKLSRRKEELCRRSINYVIEKTRRRTQCQIVIPVIEDLNVRFFHGSGKRLPGWDNFFTAKKENRWFIQGLHKAFSDLRTHRSFYVFEVRPERTSITCPKCGHCEVGNRDGEAFQCLSCGKTCNADLDVATHNLTQVALTGKTMPKREEPRDAQGTAPARKTKKASKSKAPPAEREDQTPAQEPSQTS

SEQ ID NO: 223 - protein, 766 aa, synthetic construct
  REGION 1..766: note = Casphi-3 polypeptide sequence
MEKEITELTKIRREFPNKKFSSTDMKKAGKLLKAEGPDAVRDFLNSCQEIIGDFKPPVKTNIVSISRPFEEWPVSMVGRAIQEYYFSLTKEELESVHPGTSSEDHKSFFNITGLSNYNYTSVQGLNLIFKNAKAIYDGTLVKANNKNKKLEKKFNEINHKRSLEGLPIITPDFEEPFDENGHLNNPPGINRNIYGYQGCAAKVFVPSKHKMVSLPKEYEGYNRDPNLSLAGFRNRLEIPEGEPGHVPWFQRMDIPEGQIGHVNKIQRFNFVHGKNSGKVKFSDKTGRVKRYHHSKYKDATKPYKFLEESKKVSALDSILAIITIGDDWVVFDIRGLYRNVFYRELAQKGLTAVQLLDLFTGDPVIDPKKGVVTFSYKEGVVPVFSQKIVPRFKSRDTLEKLTSQGPVALLSVDLGQNEPVAARVCSLKNINDKITLDNSCRISFLDDYKKQIKDYRDSLDELEIKIRLEAINSLETNQQVEIRDLDVFSADRAKANTVDMFDIDPNLISWDSMSDARVSTQISDLYLKNGGDESRVYFEINNKRIKRSDYNISQLVRPKLSDSTRKNLNDSIWKLKRTSEEYLKLSKRKLELSRAVVNYTIRQSKLLSGINDIVIILEDLDVKKKFNGRGIRDIGWDNFFSSRKENRWFIPAFHKAFSELSSNRGLCVIEVNPAWTSATCPDCGFCSKENRDGINFTCRKCGVSYHADIDVATLNIARVAVLGKPMSGPADRERLGDTKKPRVARSRKTMKRKDISNSTVEAMVTA

SEQ ID NO: 224 - protein, 765 aa, synthetic construct
  REGION 1..765: note = Casphi-4 polypeptide sequence
MYSLEMADLKSEPSLLAKLLRDRFPGKYWLPKYWKLAEKKRLTGGEEAACEYMADKQLDSPPPNFRPPARCVILAKSRPFEDWPVHRVASKAQSFVIGLSEQGFAALRAAPPSTADARRDWLRSHGASEDDLMALEAQLLETIMGNAISLHGGVLKKIDNANVKAAKRLSGRNEARLNKGLQELPPEQEGSAYGADGLLVNPPGLNLNIYCRKSCCPKPVKNTARFVGHYPGYLRDSDSILISGTMDRLTIIEGMPGHIPAWQREQGLVKPGGRRRRLSGSESNMRQKVDPSTGPRRSTRSGTVNRSNQRTGRNGDPLLVEIRMKEDWVLLDARGLLRNLRWRESKRGLSCDHEDLSLSGLLALFSGDPVIDPVRNEVVFLYGEGIIPVRSTKPVGTRQSKKLLERQASMGPLTLISCDLGQTNLIAGRASAISLTHGSLGVRSSVRIELDPEIIKSFERLRKDADRLETEILTAAKETLSDEQRGEVNSHEKDSPQTAKASLCRELGLHPPSLPWGQMGPSTTFIADMLISHGRDDDAFLSHGEFPTLEKRKKFDKRFCLESRPLLSSETRKALNESLWEVKRTSSEYARLSQRKKEMARRAVNFVVEISRRKTGLSNVIVNIEDLNVRIFHGGGKQAPGWDGFFRPKSENRWFIQAIHKAFSDLAAHHGIPVIESDPQRTSMTCPECGHCDSKNRNGVRFLCKGCGASMDADFDAACRNLERVALTGKPMPKPSTSCERLLSATTGKVCSDHSLSHDAIEKAS

SEQ ID NO: 225 - protein, 793 aa, synthetic construct
  REGION 1..793: note = Casphi-5 polypeptide sequence
MSSLPTPLELLKQKHADLFKGLQFSSKDNKMAGKVLKKDGEEAALAFLSERGVSRGELPNFRPPAKTLVVAQSRPFEEFPIYRVSEAIQLYVYSLSVKELETVPSGSSTKKEHQRFFQDSSVPDFGYTSVQGLNKIFGLARGIYLGVITRGENQLQKAKSKHEALNKKRRASGEAETEFDPTPYEYMTPERKLAKPPGVNHSIMCYVDISVDEFDFRNPDGIVLPSEYAGYCREINTAIEKGTVDRLGHLKGGPGYIPGHQRKESTTEGPKINFRKGRIRRSYTALYAKRDSRRVRQGKLALPSYRHHMMRLNSNAESAILAVIFFGKDWVVFDLRGLLRNVRWRNLFVDGSTPSTLLGMFGDPVIDPKRGVVAFCYKEQIVPVVSKSITKMVKAPELLNKLYLKSEDPLVLVAIDLGQTNPVGVGVYRVMNASLDYEVVTRFALESELLREIESYRQRTNAFEAQIRAETFDAMTSEEQEEITRVRAFSASKAKENVCHRFGMPVDAVDWATMGSNTIHIAKWVMRHGDPSLVEVLEYRKDNEIKLDKNGVPKKVKLTDKRIANLTSIRLRFSQETSKHYNDTMWELRRKHPVYQKLSKSKADFSRRVVNSIIRRVNHLVPRARIVFIIEDLKNLGKVFHGSGKRELGWDSYFEPKSENRWFIQVLHKAFSETGKHKGYYIIECWPNWTSCTCPKCSCCDSENRHGEVFRCLACGYTCNTDFGTAPDNLVKIATTGKGLPGPKKRCKGSSKGKNPKIARSSETGVSVTESGAPKVKKSSPTQTSQSSSQSAP

SEQ ID NO: 226 - protein, 441 aa, synthetic construct
  REGION 1..441: note = Casphi-6 polypeptide sequence
MNKIEKEKTPLAKLMNENFAGLRFPFAIIKQAGKKLLKEGELKTIEYMTGKGSIEPLPNFKPPVKCLIVAKRRDLKYFPICKASCEIQSYVYSLNYKDFMDYFSTPMTSQKQHEEFFKKSGLNIEYQNVAGLNLIFNNVKNTYNGVILKVKNRNEKLKKKAIKNNYEFEEIKTFNDDGCLINKPGINNVIYCFQSISPKILKNITHLPKEYNDYDCSVDRNIIQKYVSRLDIPESQPGHVPEWQRKLPEFNNTNNPRRRRKWYSNGRNISKGYSVDQVNQAKIEDSLLAQIKIGEDWIILDIRGLLRDLNRRELISYKNKLTIKDVLGFFSDYPIIDIKKNLVTFCYKEGVIQVVSQKSIGNKKSKQLLEKLIENKPIALVSIDLGQTNPVSVKISKLNKINNKISIESFTYRFLNEEILKEIEKYRKDYDKLELKLINEA

SEQ ID NO: 227 - protein, 772 aa, synthetic construct
  REGION 1..772: note = Casphi-7 polypeptide sequence
MSNTAVSTREHMSNKTTPPSPLSLLLRAHFPGLKFESQDYKIAGKKLRDGGPEAVISYLTGKGQAKLKDVKPPAKAFVIAQSRPFIEWDLVRVSRQIQEKIFGIPATKGRPKQDGLSETAFNEAVASLEVDGKSKLNEETRAAFYEVLGLDAPSLHAQAQNALIKSAISIREGVLKKVENRNEKNLSKTKRRKEAGEEATFVEEKAHDERGYLIHPPGVNQTIPGYQAVVIKSCPSDFIGLPSGCLAKESAEALTDYLPHDRMTIPKGQPGYVPEWQHPLLNRRKNRRRRDWYSASLNKPKATCSKRSGTPNRKNSRTDQIQSGRFKGAIPVLMRFQDEWVIIDIRGLLRNARYRKLLKEKSTIPDLLSLFTGDPSIDMRQGVCTFIYKAGQACSAKMVKTKNAPEILSELTKSGPVVLVSIDLGQTNPIAAKVSRVTQLSDGQLSHETLLRELLSNDSSDGKEIARYRVASDRLRDKLANLAVERLSPEHKSEILRAKNDTPALCKARVCAALGLNPEMIAWDKMTPYTEFLATAYLEKGGDRKVATLKPKNRPEMLRRDIKFKGTEGVRIEVSPEAAEAYREAQWDLQRTSPEYLRLSTWKQELTKRILNQLRHKAAKSSQCEVVVMAFEDLNIKMMHGNGKWADGGWDAFFIKKRENRWFMQAFHKSLTELGAHKGVPTIEVTPHRTSITCTKCGHCDKANRDGERFACQKCGFVAHADLEIATDNIERVALTGKPMPKPESERSGDAKKSVGARKAAFKPEEDAEAAE

SEQ ID NO: 228 - protein, 717 aa, synthetic construct
  REGION 1..717: note = Casphi-8 polypeptide sequence
MIKPTVSQFLTPGFKLIRNHSRTAGLKLKNEGEEACKKFVRENEIPKDECPNFQGGPAIANIIAKSREFTEWEIYQSSLAIQEVIFTLPKDKLPEPILKEEWRAQWLSEHGLDTVPYKEAAGLNLIIKNAVNTYKGVQVKVDNKNKNNLAKINRKNEIAKLNGEQEISFEEIKAFDDKGYLLQKPSPNKSIYCYQSVSPKPFITSKYHNVNLPEEYIGYYRKSNEPIVSPYQFDRLRIPIGEPGYVPKWQYTFLSKKENKRRKLSKRIKNVSPILGIICIKKDWCVFDMRGLLRTNHWKKYHKPTDSINDLFDYFTGDPVIDTKANVVRFRYKMENGIVNYKPVREKKGKELLENICDQNGSCKLATVDVGQNNPVAIGLFELKKVNGELTKTLISRHPTPIDFCNKITAYRERYDKLESSIKLDAIKQLTSEQKIEVDNYNNNFTPQNTKQIVCSKLNINPNDLPWDKMISGTHFISEKAQVSNKSEIYFTSTDKGKTKDVMKSDYKWFQDYKPKLSKEVRDALSDIEWRLRRESLEFNKLSKSREQDARQLANWISSMCDVIGIENLVKKNNFFGGSGKREPGWDNFYKPKKENRWWINAIHKALTELSQNKGKRVILLPAMRTSITCPKCKYCDSKNRNGEKFNCLKCGIELNADIDVATENLATVAITAQSMPKPTCERSGDAKKPVRARKAKAPEFHDKLAPSYTVVLREAV

SEQ ID NO: 229 - protein, 793 aa, synthetic construct
  REGION 1..793: note = Casphi-9 polypeptide sequence
MRSSREIGDKILMRQPAEKTAFQVFRQEVIGTQKLSGGDAKTAGRLYKQGKMEAAREWLLKGARDDVPPNFQPPAKCLVVAVSHPFEEWDISKTNHDVQAYIYAQPLQAEGHLNGLSEKWEDTSADQHKLWFEKTGVPDRGLPVQAINKIAKAAVNRAFGVVRKVENRNEKRRSRDNRIAEHNRENGLTEVVREAPEVATNADGFLLHPPGIDPSILSYASVSPVPYNSSKHSFVRLPEEYQAYNVEPDAPIPQFVVEDRFAIPPGQPGYVPEWQRLKCSTNKHRRMRQWSNQDYKPKAGRRAKPLEFQAHLTRERAKGALLVVMRIKEDWVVFDVRGLLRNVEWRKVLSEEAREKLTLKGLLDLFTGDPVIDTKRGIVTFLYKAEITKILSKRTVKTKNARDLLLRLTEPGEDGLRREVGLVAVDLGQTHPIAAAIYRIGRTSAGALESTVLHRQGLREDQKEKLKEYRKRHTALDSRLRKEAFETLSVEQQKEIVTVSGSGAQITKDKVCNYLGVDPSTLPWEKMGSYTHFISDDFLRRGGDPNIVHFDRQPKKGKVSKKSQRIKRSDSQWVGRMRPRLSQETAKARMEADWAAQNENEEYKRLARSKQELARWCVNTLLQNTRCITQCDEIVVVIEDLNVKSLHGKGAREPGWDNFFTPKTENRWFIQILHKTFSELPKHRGEHVIEGCPLRTSITCPACSYCDKNSRNGEKFVCVACGATFHADFEVATYNLVRLATTGMPMPKSLERQGGGEKAGGARKARKKAKQVEKIVVQANANVTMNGASLHSP

SEQ ID NO: 230 - protein, 812 aa, synthetic construct
  REGION 1..812: note = Casphi-10 polypeptide sequence
MDMLDTETNYATETPAQQQDYSPKPPKKAQRAPKGFSKKARPEKKPPKPITLFTQKHFSGVRFLKRVIRDASKILKLSESRTITFLEQAIERDGSAPPDVTPPVHNTIMAVTRPFEEWPEVILSKALQKHCYALTKKIKIKTWPKKGPGKKCLAAWSARTKIPLIPGQVQATNGLFDRIGSIYDGVEKKVTNRNANKKLEYDEAIKEGRNPAVPEYETAYNIDGTLINKPGYNPNLYITQSRTPRLITEADRPLVEKILWQMVEKKTQSRNQARRARLEKAAHLQGLPVPKFVPEKVDRSQKIEIRIIDPLDKIEPYMPQDRMAIKASQDGHVPYWQRPFLSKRRNRRVRAGWGKQVSSIQAWLTGALLVIVRLGNEAFLADIRGALRNAQWRKLLKPDATYQSLFNLFTGDPVVNTRTNHLTMAYREGVVNIVKSRSFKGRQTREHLLTLLGQGKTVAGVSFDLGQKHAAGLLAAHFGLGEDGNPVFTPIQACFLPQRYLDSLTNYRNRYDALTLDMRRQSLLALTPAQQQEFADAQRDPGGQAKRACCLKLNLNPDEIRWDLVSGISTMISDLYIERGGDPRDVHQQVETKPKGKRKSEIRILKIRDGKWAYDFRPKIADETRKAQREQLWKLQKASSEFERLSRYKINIARAIANWALQWGRELSGCDIVIPVLEDLNVGSKFFDGKGKWLLGWDNRFTPKKENRWFIKVLHKAVAELAPHRGVPVYEVMPHRTSMTCPACHYCHPTNREGDRFECQSCHVVKNTDRDVAPYNILRVAVEGKTLDRWQAEKKPQAEPDRPMILIDNQES

SEQ ID NO: 231 - protein, 84 aa, synthetic construct
  REGION 1..84: note = synthetic polypeptide sequence
MTNLSDIIEKETGKQLVIQESILMLPEEVEEVIGNKPESDILVHTAYDESTDENVMLLTSDAPEYKPWALVIQDSNGENKIKML

SEQ ID NO: 232 - protein, 1129 aa, Alicyclobacillus acidoterrestris
  REGION 1..1129: note = MISC_FEATURE - Cas12b/C2c1; sp|T0D7A2|C2C1_ALIAG CRISPR-associated endonuclease C2c1 OS = Alicyclobacillus acido-terrestris (strain ATCC 49025 /DSM 3922/ CIP 106132 / NCIMB 13137/GD3B) GN=c2c1 PE=1 SV=1; Cas12b/C2c1 polypeptide sequence
MAVKSIKVKLRLDDMPEIRAGLWKLHKEVNAGVRYYTEWLSLLRQENLYRRSPNGDGEQECDKTAEECKAELLERLRARQVENGHRGPAGSDDELLQLARQLYELLVPQAIGAKGDAQQIARKFLSPLADKDAVGGLGIAKAGNKPRWVRMREAGEPGWEEEKEKAETRKSADRTADVLRALADFGLKPLMRVYTDSEMSSVEWKPLRKGQAVRTWDRDMFQQAIERMMSWESWNQRVGQEYAKLVEQKNRFEQKNFVGQEHLVHLVNQLQQDMKEASPGLESKEQTAHYVTGRALRGSDKVFEKWGKLAPDAPFDLYDAEIKNVQRRNTRRFGSHDLFAKLAEPEYQALWREDASFLTRYAVYNSILRKLNHAKMFATFTLPDATAHPIWTRFDKLGGNLHQYTFLFNEFGERRHAIRFHKLLKVENGVAREVDDVTVPISMSEQLDNLLPRDPNEPIALYFRDYGAEQHFTGEFGGAKIQCRRDQLAHMHRRRGARDVYLNVSVRVQSQSEARGERRPPYAAVFRLVGDNHRAFVHFDKLSDYLAEHPDDGKLGSEGLLSGLRVMSVDLGLRTSASISVFRVARKDELKPNSKGRVPFFFPIKGNDNLVAVHERSQLLKLPGETESKDLRAIREERQRTLRQLRTQLAYLRLLVRCGSEDVGRRERSWAKLIEQPVDAANHMTPDWREAFENELQKLKSLHGICSDKEWMDAVYESVRRVWRHMGKQVRDWRKDVRSGERPKIRGYAKDVVGGNSIEQIEYLERQYKFLKSWSFFGKVSGQVIRAEKGSRFAITLREHIDHAKEDRLKKLADRIIMEALGYVYALDERGKGKWVAKYPPCQLILLEELSEYQFNNDRPPSENNQLMQWSHRGVFQELINQAQVHDLLVGTMYAAFSSRFDARTGAPGIRCRRVPARCTQEHNPEPFPWWLNKFVVEHTLDACPLRADDLIPTGEGEIFVSPFSAEEGDFHQIHADLNAAQNLQQRLWSDFDISQIRLRCDWGEVDGELVLIPRLTGKRTADSYSNKVFYTNTGVTYYERERGKKRRKVFAQEKLSEEEAELLVEADEAREKSVVLMRDPSGIINRGNWTRQKEFWSMVNQRIEGYLVKQIRSRVPLQDSACENTGDI

SEQ ID NO: 233 - protein, 1368 aa, Mus musculus
  REGION 1..1368: note = MISC_FEATURE - high fidelity Cas9 polypeptide sequence
MDKKYSIGLAIGTNSVGWAVITDEYKVPSKKFKVLGNTDRHSIKKNLIGALLFDSGETAEATRLKRTARRRYTRRKNRICYLQEIFSNEMAKVDDSFFHRLEESFLVEEDKKHERHPIFGNIVDEVAYHEKYPTIYHLRKKLVDSTDKADLRLIYLALAHMIKFRGHFLIEGDLNPDNSDVDKLFIQLVQTYNQLFEENPINASGVDAKAILSARLSKSRRLENLIAQLPGEKKNGLFGNLIALSLGLTPNFKSNFDLAEDAKLQLSKDTYDDDLDNLLAQIGDQYADLFLAAKNLSDAILLSDILRVNTEITKAPLSASMIKRYDEHHQDLTLLKALVRQQLPEKYKEIFFDQSKNGYAGYIDGGASQEEFYKFIKPILEKMDGTEELLVKLNREDLLRKQRTFDNGSIPHQIHLGELHAILRRQEDFYPFLKDNREKIEKILTFRIPYYVGPLARGNSRFAWMTRKSEETITPWNFEEVVDKGASAQSFIERMTAFDKNLPNEKVLPKHSLLYEYFTVYNELTKVKYVTEGMRKPAFLSGEQKKAIVDLLFKTNRKVTVKQLKEDYFKKIECFDSVEISGVEDRFNASLGTYHDLLKIIKDKDFLDNEENEDILEDIVLTLTLFEDREMIEERLKTYAHLFDDKVMKQLKRRRYTGWGALSRKLINGIRDKQSGKTILDFLKSDGFANRNFMALIHDDSLTFKEDIQKAQVSGQGDSLHEHIANLAGSPAIKKGILQTVKVVDELVKVMGRHKPENIVIEMARENQTTQKGQKNSRERMKRIEEGIKELGSQILKEHPVENTQLQNEKLYLYYLQNGRDMYVDQELDINRLSDYDVDHIVPQSFLKDDSIDNKVLTRSDKNRGKSDNVPSEEVVKKMKNYWRQLLNAKLITQRKFDNLTKAERGGLSELDKAGFIKRQLVETRAITKHVAQILDSRMNTKYDENDKLIREVKVITLKSKLVSDFRKDFQFYKVREINNYHHAHDAYLNAVVGTALIKKYPKLESEFVYGDYKVYDVRKMIAKSEQEIGKATAKYFFYSNIMNFFKTEITLANGEIRKRPLIETNGETGEIVWDKGRDFATVRKVLSMPQVNIVKKTEVQTGGFSKESILPKRNSDKLIARKKDWDPKKYGGFDSPTVAYSVLVVAKVEKGKSKKLKSVKELLGITIMERSSFEKNPIDFLEAKGYKEVKKDLIIKLPKYSLFELENGRKRMLASAGELQKGNELALPSKYVNFLYLASHYEKLKGSPEDNEQKQLFVEQHKHYLDEIIEQISEFSKRVILADANLDKVLSAYNKHRDKPIREQAENIIHLFTLTNLGAPAAFKYFDTTIDRKRYTSTKEVLDATLIHQSITGLYETRIDLSQLGGD

SEQ ID NO: 234 - protein, 1368 aa, Streptococcus pyogenes
  REGION 1..1368: note = MISC_FEATURE - PAM-binding SpEQR Cas9 polypeptide sequence
MDKKYSIGLAIGTNSVGWAVITDEYKVPSKKFKVLGNTDRHSIKKNLIGALLFDSGETAEATRLKRTARRRYTRRKNRICYLQEIFSNEMAKVDDSFFHRLEESVLVEEDKKHERHPIFGNIVDEVAYHEKYPTIYHLRKKLVDSTDKADLRLIYLALAHMIKFRGHFLIEGDLNPDNSDVDKLFIQLVQTYNQLFEENPINASGVDAKAILSARLSKSRRLENLIAQLPGEKKNGLFGNLIALSLGLTPNFKSNFDLAEDAKLQLSKDTYDDDLDNLLAQIGDQYADLFLAAKNLSDAILLSDILRVNTEITKAPLSASMIKRYDEHHQDLTLLKALVRQQLPEKYKEIFFDQSKNGYAGYIDGGASQEEFYKFIKPILEKMDGTEELLVKLNREDLLRKQRTFDNGSIPHQIHLGELHAILRRQEDFYPFLKDNREKIEKILTFRIPYYVGPLARGNSRFAWMTRKSEETITPWNFEEVVDKGASAQSFIERMTNFDKNLPNEKVLPKHSLLYEYFTVYNELTKVKYVTEGMRKPAFLSGEQKKAIVDLLFKTNRKVTVKQLKEDYFKKIECFDSVEISGVEDRFNASLGTYHDLLKIIKDKDFLDNEENEDILEDIVLTLTLFEDREMIEERLKTYAHLFDDKVMKQLKRRRYTGWGRLSRKLINGIRDKQSGKTILDFLKSDGFANRNFMQLIHDDSLTFKEDIQKAQVSGQGDSLHEHIANLAGSPAIKKGILQTVKVVDELVKVMGRHKPENIVIEMARENQTTQKGQKNSRERMKRIEEGIKELGSQILKEHPVENTQLQNEKLYLYYLQNGRDMYVDQELDINRLSDYDVDHIVPQSFLKDDSIDNKVLTRSDKNRGKSDNVPSEEVVKKMKNYWRQLLNAKLITQRKFDNLTKAERGGLSELDKAGFIKRQLVETRQITKHVAQILDSRMNTKYDENDKLIREVKVITLKSKLVSDFRKDFQFYKVREINNYHHAHDAYLNAVVGTALIKKYPKLESEFVYGDYKVYDVRKMIAKSEQEIGKATAKYFFYSNIMNFFKTEITLANGEIRKRPLIETNGETGEIVWDKGRDFATVRKVLSMPQVNIVKKTEVQTGGFSKESILPKRNSDKLIARKKDWDPKKYGGFESPTVAYSVLVVAKVEKGKSKKLKSVKELLGITIMERSSFEKNPIDFLEAKGYKEVKKDLIIKLPKYSLFELENGRKRMLASAGELQKGNELALPSKYVNFLYLASHYEKLKGSPEDNEQKQLFVEQHKHYLDEIIEQISEFSKRVILADANLDKVLSAYNKHRDKPIREQAENIIHLFTLTNLGAPAAFKYFDTTIDRKQYRSTKEVLDATLIHQSITGLYETRIDLSQLGGD

SEQ ID NO: 235 - protein, 1368 aa, Streptococcus pyogenes
  REGION 1..1368: note = MISC_FEATURE - PAM-binding SpVQR Cas9 polypeptide sequence
MDKKYSIGLAIGTNSVGWAVITDEYKVPSKKFKVLGNTDRHSIKKNLIGALLFDSGETAEATRLKRTARRRYTRRKNRICYLQEIFSNEMAKVDDSFFHRLEESFLVEEDKKHERHPIFGNIVDEVAYHEKYPTIYHLRKKLVDSTDKADLRLIYLALAHMIKFRGHFLIEGDLNPDNSDVDKLFIQLVQTYNQLFEENPINASGVDAKAILSARLSKSRRLENLIAQLPGEKKNGLFGNLIALSLGLTPNFKSNFDLAEDAKLQLSKDTYDDDLDNLLAQIGDQYADLFLAAKNLSDAILLSDILRVNTEITKAPLSASMIKRYDEHHQDLTLLKALVRQQLPEKYKEIFFDQSKNGYAGYIDGGASQEEFYKFIKPILEKMDGTEELLVKLNREDLLRKQRTFDNGSIPHQIHLGELHAILRRQEDFYPFLKDNREKIEKILTFRIPYYVGPLARGNSRFAWMTRKSEETITPWNFEEVVDKGASAQSFIERMTNFDKNLPNEKVLPKHSLLYEYFTVYNELTKVKYVTEGMRKPAFLSGEQKKAIVDLLFKTNRKVTVKQLKEDYFKKIECFDSVEISGVEDRFNASLGTYHDLLKIIKDKDFLDNEENEDILEDIVLTLTLFEDREMIEERLKTYAHLFDDKVMKQLKRRRYTGWGRLSRKLINGIRDKQSGKTILDFLKSDGFANRNFMQLIHDDSLTFKEDIQKAQVSGQGDSLHEHIANLAGSPAIKKGILQTVKVVDELVKVMGRHKPENIVIEMARENQTTQKGQKNSRERMKRIEEGIKELGSQILKEHPVENTQLQNEKLYLYYLQNGRDMYVDQELDINRLSDYDVDHIVPQSFLKDDSIDNKVLTRSDKNRGKSDNVPSEEVVKKMKNYWRQLLNAKLITQRKFDNLTKAERGGLSELDKAGFIKRQLVETRQITKHVAQILDSRMNTKYDENDKLIREVKVITLKSKLVSDFRKDFQFYKVREINNYHHAHDAYLNAVVGTALIKKYPKLESEFVYGDYKVYDVRKMIAKSEQEIGKATAKYFFYSNIMNFFKTEITLANGEIRKRPLIETNGETGEIVWDKGRDFATVRKVLSMPQVNIVKKTEVQTGGFSKESILPKRNSDKLIARKKDWDPKKYGGFVSPTVAYSVLVVAKVEKGKSKKLKSVKELLGITIMERSSFEKNPIDFLEAKGYKEVKKDLIIKLPKYSLFELENGRKRMLASAGELQKGNELALPSKYVNFLYLASHYEKLKGSPEDNEQKQLFVEQHKHYLDEIIEQISEFSKRVILADANLDKVLSAYNKHRDKPIREQAENIIHLFTLTNLGAPAAFKYFDTTIDRKQYRSTKEVLDATLIHQSITGLYETRIDLSQLGGD

SEQ ID NO: 236 - protein, 1368 aa, Streptococcus pyogenes
  REGION 1..1368: note = MISC_FEATURE - SpVQR Cas9 polypeptide sequence
MDKKYSIGLAIGTNSVGWAVITDEYKVPSKKFKVLGNTDRHSIKKNLIGALLFDSGETAEATRLKRTARRRYTRRKNRICYLQEIFSNEMAKVDDSFFHRLEESFLVEEDKKHERHPIFGNIVDEVAYHEKYPTIYHLRKKLVDSTDKADLRLIYLALAHMIKFRGHFLIEGDLNPDNSDVDKLFIQLVQTYNQLFEENPINASGVDAKAILSARLSKSRRLENLIAQLPGEKKNGLFGNLIALSLGLTPNFKSNFDLAEDAKLQLSKDTYDDDLDNLLAQIGDQYADLFLAAKNLSDAILLSDILRVNTEITKAPLSASMIKRYDEHHQDLTLLKALVRQQLPEKYKEIFFDQSKNGYAGYIDGGASQEEFYKFIKPILEKMDGTEELLVKLNREDLLRKQRTFDNGSIPHQIHLGELHAILRRQEDFYPFLKDNREKIEKILTFRIPYYVGPLARGNSRFAWMTRKSEETITPWNFEEVVDKGASAQSFIERMTNFDKNLPNEKVLPKHSLLYEYFTVYNELTKVKYVTEGMRKPAFLSGEQKKAIVDLLFKTNRKVTVKQLKEDYFKKIECFDSVEISGVEDRFNASLGTYHDLLKIIKDKDFLDNEENEDILEDIVLTLTLFEDREMIEERLKTYAHLFDDKVMKQLKRRRYTGWGRLSRKLINGIRDKQSGKTILDFLKSDGFANRNFMQLIHDDSLTFKEDIQKAQVSGQGDSLHEHIANLAGSPAIKKGILQTVKVVDELVKVMGRHKPENIVIEMARENQTTQKGQKNSRERMKRIEEGIKELGSQILKEHPVENTQLQNEKLYLYYLQNGRDMYVDQELDINRLSDYDVDHIVPQSFLKDDSIDNKVLTRSDKNRGKSDNVPSEEVVKKMKNYWRQLLNAKLITQRKFDNLTKAERGGLSELDKAGFIKRQLVETRQITKHVAQILDSRMNTKYDENDKLIREVKVITLKSKLVSDFRKDFQFYKVREINNYHHAHDAYLNAVVGTALIKKYPKLESEFVYGDYKVYDVRKMIAKSEQEIGKATAKYFFYSNIMNFFKTEITLANGEIRKRPLIETNGETGEIVWDKGRDFATVRKVLSMPQVNIVKKTEVQTGGFSKESILPKRNSDKLIARKKDWDPKKYGGFVSPTVAYSVLVVAKVEKGKSKKLKSVKELLGITIMERSSFEKNPIDFLEAKGYKEVKKDLIIKLPKYSLFELENGRKRMLASARELQKGNELALPSKYVNFLYLASHYEKLKGSPEDNEQKQLFVEQHKHYLDEIIEQISEFSKRVILADANLDKVLSAYNKHRDKPIREQAENIIHLFTLTNLGAPAAFKYFDTTIDRKEYRSTKEVLDATLIHQSITGLYETRIDLSQLGGD

SEQ ID NO: 237 - protein, 1359 aa, Streptococcus macacae
  REGION 1..1359: note = MISC_FEATURE - SpyMacCas9 polypeptide sequence
MDKKYSIGLDIGTNSVGWAVITDDYKVPSKKFKVLGNTDRHSIKKNLIGALLFGSGETAEATRLKRTARRRYTRRKNRICYLQEIFSNEMAKVDDSFFHRLEESFLVEEDKKHERHPIFGNIVDEVAYHEKYPTIYHLRKKLADSTDKADLRLIYLALAHMIKFRGHFLIEGDLNPDNSDVDKLFIQLVQIYNQLFEENPINASRVDAKAILSARLSKSRRLENLIAQLPGEKRNGLFGNLIALSLGLTPNFKSNFDLAEDAKLQLSKDTYDDDLDNLLAQIGDQYADLFLAAKNLSDAILLSDILRVNSEITKAPLSASMIKRYDEHHQDLTLLKALVRQQLPEKYKEIFFDQSKNGYAGYIDGGASQEEFYKFIKPILEKMDGTEELLVKLNREDLLRKQRTFDNGSIPHQIHLGELHAILRRQEDFYPFLKDNREKIEKILTFRIPYYVGPLARGNSRFAWMTRKSEETITPWNFEEVVDKGASAQSFIERMTNFDKNLPNEKVLPKHSLLYEYFTVYNELTKVKYVTEGMRKPAFLSGEQKKAIVDLLFKTNRKVTVKQLKEDYFKKIECFDSVEISGVEDRFNASLGAYHDLLKIIKDKDFLDNEENEDILEDIVLTLTLFEDRGMIEERLKTYAHLFDDKVMKQLKRRRYTGWGRLSRKLINGIRDKQSGKTILDFLKSDGFANRNFMQLIHDDSLTFKEDIQKAQVSGQGHSLHEQIANLAGSPAIKKGILQTVKIVDELVKVMGHKPENIVIEMARENQTTQKGQKNSRERMKRIEEGIKELGSQILKEHPVENTQLQNEKLYLYYLQNGRDMYVDQELDINRLSDYDVDHIVPQSFIKDDSIDNKVLTRSDKNRGKSDNVPSEEVVKKMKNYWRQLLNAKLITQRKFDNLTKAERGGLSELDKAGFIKRQLVETRQITKHVAQILDSRMNTKYDENDKLIREVKVITLKSKLVSDFRKDFQFYKVREINNYHHAHDAYLNAVVGTALIKKYPKLESEFVYGDYKVYDVRKMIAKSEQEIGKATAKYFFYSNIMNFFKTEITLANGEIRKRPLIETNGETGEIVWDKGRDFATVRKVLSMPQVNIVKKTEIQTVGQNGGLFDDNPKSPLEVTPSKLVPLKKELNPKKYGGYQKPTTAYPVLLITDTKQLIPISVMNKKQFEQNPVKFLRDRGYQQVGKNDFIKLPKYTLVDIGDGIKRLWASSKEIHKGNQLVVSKKSQILLYHAHHLDSDLSNDYLQNHNQQFDVLFNEIISFSKKCKLGKEHIQKIENVYSNKKNSASIEELAESFIKLLGFTQLGATSPFNFLGVKLNQKQYKGKKDYILPCTEGTLIRQSITGLYETRVDLSKIGED

SEQ ID NO: 238 - protein, 1410 aa, synthetic construct
  REGION 1..1410: note = CP5 polypeptide sequence
  REGION 1..341: note = MISC_FEATURE - Sequence derived from Cas9
  REGION 342..362: note = MISC_FEATURE - Linker sequence
  REGION 363..1388: note = MISC_FEATURE - Sequence derived from Cas9
  REGION 1389..1410: note = MISC_FEATURE - Bipartite nuclear localization sequence
EIGKATAKYFFYSNIMNFFKTEITLANGEIRKRPLIETNGETGEIVWDKGRDFATVRKVLSMPQVNIVKKTEVQTGGFSKESILPKRNSDKLIARKKDWDPKKYGGFMQPTVAYSVLVVAKVEKGKSKKLKSVKELLGITIMERSSFEKNPIDFLEAKGYKEVKKDLIIKLPKYSLFELENGRKRMLASAKFLQKGNELALPSKYVNFLYLASHYEKLKGSPEDNEQKQLFVEQHKHYLDEIIEQISEFSKRVILADANLDKVLSAYNKHRDKPIREQAENIIHLFTLTNLGAPRAFKYFDTTIARKEYRSTKEVLDATLIHQSITGLYETRIDLSQLGGDGGSGGSGGSGGSGGSGGSGGMDKKYSIGLAIGTNSVGWAVITDEYKVPSKKFKVLGNTDRHSIKKNLIGALLFDSGETAEATRLKRTARRRYTRRKNRICYLQEIFSNEMAKVDDSFFHRLEESFLVEEDKKHERHPIFGNIVDEVAYHEKYPTIYHLRKKLVDSTDKADLRLIYLALAHMIKFRGHFLIEGDLNPDNSDVDKLFIQLVQTYNQLFEENPINASGVDAKAILSARLSKSRRLENLIAQLPGEKKNGLFGNLIALSLGLTPNFKSNFDLAEDAKLQLSKDTYDDDLDNLLAQIGDQYADLFLAAKNLSDAILLSDILRVNTEITKAPLSASMIKRYDEHHQDLTLLKALVRQQLPEKYKEIFFDQSKNGYAGYIDGGASQEEFYKFIKPILEKMDGTEELLVKLNREDLLRKQRTFDNGSIPHQIHLGELHAILRRQEDFYPFLKDNREKIEKILTFRIPYYVGPLARGNSRFAWMTRKSEETITPWNFEEVVDKGASAQSFIERMTNFDKNLPNEKVLPKHSLLYEYFTVYNELTKVKYVTEGMRKPAFLSGEQKKAIVDLLFKTNRKVTVKQLKEDYFKKIECFDSVEISGVEDRFNASLGTYHDLLKIIKDKDFLDNEENEDILEDIVLTLTLFEDREMIEERLKTYAHLFDDKVMKQLKRRRYTGWGRLSRKLINGIRDKQSGKTILDFLKSDGFANRNFMQLIHDDSLTFKEDIQKAQVSGQGDSLHEHIANLAGSPAIKKGILQTVKVVDELVKVMGRHKPENIVIEMARENQTTQKGQKNSRERMKRIEEGIKELGSQILKEHPVENTQLQNEKLYLYYLQNGRDMYVDQELDINRLSDYDVDHIVPQSFLKDDSIDNKVLTRSDKNRGKSDNVPSEEVVKKMKNYWRQLLNAKLITQRKFDNLTKAERGGLSELDKAGFIKRQLVETRQITKHVAQILDSRMNTKYDENDKLIREVKVITLKSKLVSDFRKDFQFYKVREINNYHHAHDAYLNAVVGTALIKKYPKLESEFVYGDYKVYDVRKMIAKSEQEGADKRTADGSEFESPKKKRKV

SEQ ID NO: 239 - protein, 1302 aa, synthetic construct
  REGION 1..1302: note = Cas12c1 polypeptide sequence
MQTKKTHLHLISAKASRKYRRTIACLSDTAKKDLERRKQSGAADPAQELSCLKTIKFKLEVPEGSKLPSFDRISQIYNALETIEKGSLSYLLFALILSGFRIFPNSSAAKTFASSSCYKNDQFASQIKEIFGEMVKNFIPSELESILKKGRRKNNKDWTEENIKRVLNSEFGRKNSEGSSALFDSFLSKFSQELFRKFDSWNEVNKKYLEAAELLDSMLASYGPFDSVCKMIGDSDSRNSLPDKSTIAFTNNAEITVDIESSVMPYMAIAALLREYRQSKSKAAPVAYVQSHLTTTNGNGLSWFFKFGLDLIRKAPVSSKQSTSDGSKSLQELFSVPDDKLDGLKFIKEACEALPEASLLCGEKGELLGYQDFRTSFAGHIDSWVANYVNRLFELIELVNQLPESIKLPSILTQKNHNLVASLGLQEAEVSHSLELFEGLVKNVRQTLKKLAGIDISSSPNEQDIKEFYAFSDVLNRLGSIRNQIENAVQTAKKDKIDLESAIEWKEWKKLKKLPKLNGLGGGVPKQQELLDKALESVKQIRHYQRIDFERVIQWAVNEHCLETVPKFLVDAEKKKINKESSTDFAAKENAVRFLLEGIGAAARGKTDSVSKAAYNWFVVNNFLAKKDLNRYFINCQGCIYKPPYSKRRSLAFALRSDNKDTIEVVWEKFETFYKEISKEIEKFNIFSQEFQTFLHLENLRMKLLLRRIQKPIPAEIAFFSLPQEYYDSLPPNVAFLALNQEITPSEYITQFNLYSSFLNGNLILLRRSRSYLRAKFSWVGNSKLIYAAKEARLWKIPNAYWKSDEWKMILDSNVLVFDKAGNVLPAPTLKKVCEREGDLRLFYPLLRQLPHDWCYRNPFVKSVGREKNVIEVNKEGEPKVASALPGSLFRLIGPAPFKSLLDDCFFNPLDKDLRECMLIVDQEISQKVEAQKVEASLESCTYSIAVPIRYHLEEPKVSNQFENVLAIDQGEAGLAYAVFSLKSIGEAETKPIAVGTIRIPSIRRLIHSVSTYRKKKQRLQNFKQNYDSTAFIMRENVTGDVCAKIVGLMKEFNAFPVLEYDVKNLESGSRQLSAVYKAVNSHFLYFKEPGRDALRKQLWYGGDSWTIDGIEIVTRERKEDGKEGVEKIVPLKVFPGRSVSARFTSKTCSCCGRNVFDWLFTEKKAKTNKKFNVNSKGELTTADGVIQLFEADRSKGPKFYARRKERTPLTKPIAKGSYSLEEIERRVRTNLRRAPKSKQSRDTSQSQYFCVYKDCALHFSGMQADENAAINIGRRFLTALRKNRRSDFPSNVKISDRLLDN

SEQ ID NO: 240 - protein, 1218 aa, synthetic construct
  REGION 1..1218: note = Cas12c2 polypeptide sequence
MTKHSIPLHAFRNSGADARKWKGRIALLAKRGKETMRTLQFPLEMSEPEAAAINTTPFAVAYNAIEGTGKGTLFDYWAKLHLAGFRFFPSGGAATIFRQQAVFEDASWNAAFCQQSGKDWPWLVPSKLYERFTKAPREVAKKDGSKKSIEFTQENVANESHVSLVGASITDKTPEDQKEFFLKMAGALAEKFDSWKSANEDRIVAMKVIDEFLKSEGLHLPSLENIAVKCSVETKPDNATVAWHDAPMSGVQNLAIGVFATCASRIDNIYDLNGGKLSKLIQESATTPNVTALSWLFGKGLEYFRTTDIDTIMQDFNIPASAKESIKPLVESAQAIPTMTVLGKKNYAPFRPNFGGKIDSWIANYASRLMLLNDILEQIEPGFELPQALLDNETLMSGIDMTGDELKELIEAVYAWVDAAKQGLATLLGRGGNVDDAVQTFEQFSAMMDTLNGTLNTISARYVRAVEMAGKDEARLEKLIECKFDIPKWCKSVPKLVGISGGLPKVEEEIKVMNAAFKDVRARMFVRFEEIAAYVASKGAGMDVYDALEKRELEQIKKLKSAVPERAHIQAYRAVLHRIGRAVQNCSEKTKQLFSSKVIEMGVFKNPSHLNNFIFNQKGAIYRSPFDRSRHAPYQLHADKLLKNDWLELLAEISATLMASESTEQMEDALRLERTRLQLQLSGLPDWEYPASLAKPDIEVEIQTALKMQLAKDTVTSDVLQRAFNLYSSVLSGLTFKLLRRSFSLKMRFSVADTTQLIYVPKVCDWAIPKQYLQAEGEIGIAARVVTESSPAKMVTEVEMKEPKALGHFMQQAPHDWYFDASLGGTQVAGRIVEKGKEVGKERKLVGYRMRGNSAYKTVLDKSLVGNTELSQCSMIIEIPYTQTVDADFRAQVQAGLPKVSINLPVKETITASNKDEQMLFDRFVAIDLGERGLGYAVFDAKTLELQESGHRPIKAITNLLNRTHHYEQRPNQRQKFQAKFNVNLSELRENTVGDVCHQINRICAYYNAFPVLEYMVPDRLDKQLKSVYESVTNRYIWSSTDAHKSARVQFWLGGETWEHPYLKSAKDKKPLVLSPGRGASGKGTSQTCSCCGRNPFDLIKDMKPRAKIAVVDGKAKLENSELKLFERNLESKDDMLARRHRNERAGMEQPLTPGNYTVDEIKALLRANLRRAPKNRRTKDTTVSEYHCVFSDCGKTMHADENAAVNIGGKFIADIEK

SEQ ID NO: 241 - protein, 1252 aa, Oleiphilus sp.
  REGION 1..1252: note = MISC_FEATURE - OspCas12c polypeptide sequence
MTKLRHRQKKLTHDWAGSKKREVLGSNGKLQNPLLMPVKKGQVTEFRKAFSAYARATKGEMTDGRKNMFTHSFEPFKTKPSLHQCELADKAYQSLHSYLPGSLAHFLLSAHALGFRIFSKSGEATAFQASSKIEAYESKLASELACVDLSIQNLTISTLFNALTTSVRGKGEETSADPLIARFYTLLTGKPLSRDTQGPERDLAEVISRKIASSFGTWKEMTANPLQSLQFFEEELHALDANVSLSPAFDVLIKMNDLQGDLKNRTIVFDPDAPVFEYNAEDPADIIIKLTARYAKEAVIKNQNVGNYVKNAITTTNANGLGWLLNKGLSLLPVSTDDELLEFIGVERSHPSCHALIELIAQLEAPELFEKNVFSDTRSEVQGMIDSAVSNHIARLSSSRNSLSMDSEELERLIKSFQIHTPHCSLFIGAQSLSQQLESLPEALQSGVNSADILLGSTQYMLTNSLVEESIATYQRTLNRINYLSGVAGQINGAIKRKAIDGEKIHLPAAWSELISLPFIGQPVIDVESDLAHLKNQYQTLSNEFDTLISALQKNFDLNFNKALLNRTQHFEAMCRSTKKNALSKPEIVSYRDLLARLTSCLYRGSLVLRRAGIEVLKKHKIFESNSELREHVHERKHFVFVSPLDRKAKKLLRLTDSRPDLLHVIDEILQHDNLENKDRESLWLVRSGYLLAGLPDQLSSSFINLPIITQKGDRRLIDLIQYDQINRDAFVMLVTSAFKSNLSGLQYRANKQSFVVTRTLSPYLGSKLVYVPKDKDWLVPSQMFEGRFADILQSDYMVWKDAGRLCVIDTAKHLSNIKKSVFSSEEVLAFLRELPHRTFIQTEVRGLGVNVDGIAFNNGDIPSLKTFSNCVQVKVSRTNTSLVQTLNRWFEGGKVSPPSIQFERAYYKKDDQIHEDAAKRKIRFQMPATELVHASDDAGWTPSYLLGIDPGEYGMGLSLVSINNGEVLDSGFIHINSLINFASKKSNHQTKVVPRQQYKSPYANYLEQSKDSAAGDIAHILDRLIYKLNALPVFEALSGNSQSAADQVWTKVLSFYTWGDNDAQNSIRKQHWFGASHWDIKGMLRQPPTEKKPKPYIAFPGSQVSSYGNSQRCSCCGRNPIEQLREMAKDTSIKELKIRNSEIQLFDGTIKLFNPDPSTVIERRRHNLGPSRIPVADRTFKNISPSSLEFKELITIVSRSIRHSPEFIAKKRGIGSEYFCAYSDCNSSLNSEANAAANVAQKFQKQLFFEL

SEQ ID NO: 242 - protein, 767 aa, synthetic construct
  REGION 1..767: note = Cas12g1 polypeptide sequence
MAQASSTPAVSPRPRPRYREERTLVRKLLPRPGQSKQEFRENVKKLRKAFLQFNADVSGVCQWAIQFRPRYGKPAEPTETFWKFFLEPETSLPPNDSRSPEFRRLQAFEAAAGINGAAALDDPAFTNELRDSILAVASRPKTKEAQRLFSRLKDYQPAHRMILAKVAAEWIESRYRRAHQNWERNYEEWKKEKQEWEQNHPELTPEIREAFNQIFQQLEVKEKRVRICPAARLLQNKDNCQYAGKNKHSVLCNQFNEFKKNHLQGKAIKFFYKDAEKYLRCGLQSLKPNVQGPFREDWNKYLRYMNLKEETLRGKNGGRLPHCKNLGQECEFNPHTALCKQYQQQLSSRPDLVQHDELYRKWRREYWREPRKPVFRYPSVKRHSIAKIFGENYFQADFKNSVVGLRLDSMPAGQYLEFAFAPWPRNYRPQPGETEISSVHLHFVGTRPRIGFRFRVPHKRSRFDCTQEELDELRSRTFPRKAQDQKFLEAARKRLLETFPGNAEQELRLLAVDLGTDSARAAFFIGKTFQQAFPLKIVKIEKLYEQWPNQKQAGDRRDASSKQPRPGLSRDHVGRHLQKMRAQASEIAQKRQELTGTPAPETTTDQAAKKATLQPFDLRGLTVHTARMIRDWARLNARQIIQLAEENQVDLIVLESLRGFRPPGYENLDQEKKRRVAFFAHGRIRRKVTEKAVERGMRVVTVPYLASSKVCAECRKKQKDNKQWEKNKKRGLFKCEGCGSQAQVDENAARVLGRVFWGEIELPTAIP

SEQ ID NO: 243 - protein, 870 aa, synthetic construct
  REGION 1..870: note = Cas12h1 polypeptide sequence
MKVHEIPRSQLLKIKQYEGSFVEWYRDLQEDRKKFASLLFRWAAFGYAAREDDGATYISPSQALLERRLLLGDAEDVAIKFLDVLFKGGAPSSSCYSLFYEDFALRDKAKYSGAKREFIEGLATMPLDKIIERIRQDEQLSKIPAEEWLILGAEYSPEEIWEQVAPRIVNVDRSLGKQLRERLGIKCRRPHDAGYCKILMEVVARQLRSHNETYHEYLNQTHEMKTKVANNLTNEFDLVCEFAEVLEEKNYGLGWYVLWQGVKQALKEQKKPTKIQIAVDQLRQPKFAGLLTAKWRALKGAYDTWKLKKRLEKRKAFPYMPNWDNDYQIPVGLTGLGVFTLEVKRTEVVVDLKEHGKLFCSHSHYFGDLTAEKHPSRYHLKFRHKLKLRKRDSRVEPTIGPWIEAALREITIQKKPNGVFYLGLPYALSHGIDNFQIAKRFFSAAKPDKEVINGLPSEMVVGAADLNLSNIVAPVKARIGKGLEGPLHALDYGYGELIDGPKILTPDGPRCGELISLKRDIVEIKSAIKEFKACQREGLTMSEETTTWLSEVESPSDSPRCMIQSRIADTSRRLNSFKYQMNKEGYQDLAEALRLLDAMDSYNSLLESYQRMHLSPGEQSPKEAKFDTKRASFRDLLRRRVAHTIVEYFDDCDIVFFEDLDGPSDSDSRNNALVKLLSPRTLLLYIRQALEKRGIGMVEVAKDGTSQNNPISGHVGWRNKQNKSEIYFYEDKELLVMDADEVGAMNILCRGLNHSVCPYSFVTKAPEKKNDEKKEGDYGKRVKRFLKDRYGSSNVRFLVASMGFVTVTTKRPKDALVGKRLYYHGGELVTHDLHNRMKDEIKYLVEKEVLARRVSLSDSTIKSYKSFAHV

SEQ ID NO: 244 - protein, 1093 aa, synthetic construct
  REGION 1..1093: note = Cas12i1 polypeptide sequence
MSNKEKNASETRKAYTTKMIPRSHDRMKLLGNFMDYLMDGTPIFFELWNQFGGGIDRDIISGTANKDKISDDLLLAVNWFKVMPINSKPQGVSPSNLANLFQQYSGSEPDIQAQEYFASNFDTEKHQWKDMRVEYERLLAELQLSRSDMHHDLKLMYKEKCIGLSLSTAHYITSVMFGTGAKNNRQTKHQFYSKVIQLLEESTQINSVEQLASIILKAGDCDSYRKLRIRCSRKGATPSILKIVQDYELGTNHDDEVNVPSLIANLKEKLGRFEYECEWKCMEKIKAFLASKVGPYYLGSYSAMLENALSPIKGMTTKNCKFVLKQIDAKNDIKYENEPFGKIVEGFFDSPYFESDTNVKWVLHPHHIGESNIKTLWEDLNAIHSKYEEDIASLSEDKKEKRIKVYQGDVCQTINTYCEEVGKEAKTPLVQLLRYLYSRKDDIAVDKIIDGITFLSKKHKVEKQKINPVIQKYPSFNFGNNSKLLGKIISPKDKLKHNLKCNRNQVDNYIWIEIKVLNTKTMRWEKHHYALSSTRFLEEVYYPATSENPPDALAARFRTKTNGYEGKPALSAEQIEQIRSAPVGLRKVKKRQMRLEAARQQNLLPRYTWGKDFNINICKRGNNFEVTLATKVKKKKEKNYKVVLGYDANIVRKNTYAAIEAHANGDGVIDYNDLPVKPIESGFVTVESQVRDKSYDQLSYNGVKLLYCKPHVESRRSFLEKYRNGTMKDNRGNNIQIDFMKDFEAIADDETSLYYFNMKYCKLLQSSIRNHSSQAKEYREEIFELLRDGKLSVLKLSSLSNLSFVMFKVAKSLIGTYFGHLLKKPKNSKSDVKAPPITDEDKQKADPEMFALRLALEEKRLNKVKSKKEVIANKIVAKALELRDKYGPVLIKGENISDTTKKGKKSSTNSFLMDWLARGVANKVKEMVMMHQGLEFVEVNPNFTSHQDPFVHKNPENTFRARYSRCTPSELTEKNRKEILSFLSDKPSKRPTNAYYNEGAMAFLATYGLKKNDVLGVSLEKFKQIMANILHQRSEDQLLFPSRGGMFYLATYKLDADATSVNWNGKQFWVCNADLVAAYNVGLVDIQKDFKKK

SEQ ID NO: 245 - protein, 1054 aa, synthetic construct
  REGION 1..1054: note = Cas12i2 polypeptide sequence
MSSAIKSYKSVLRPNERKNQLLKSTIQCLEDGSAFFFKMLQGLFGGITPEIVRFSTEQEKQQQDIALWCAVNWFRPVSQDSLTHTIASDNLVEKFEEYYGGTASDAIKQYFSASIGESYYWNDCRQQYYDLCRELGVEVSDLTHDLEILCREKCLAVATESNQNNSIISVLFGTGEKEDRSVKLRITKKILEAISNLKEIPKNVAPIQEIILNVAKATKETFRQVYAGNLGAPSTLEKFIAKDGQKEFDLKKLQTDLKKVIRGKSKERDWCCQEELRSYVEQNTIQYDLWAWGEMFNKAHTALKIKSTRNYNFAKQRLEQFKEIQSLNNLLVVKKLNDFFDSEFFSGEETYTICVHHLGGKDLSKLYKAWEDDPADPENAIVVLCDDLKNNFKKEPIRNILRYIFTIRQECSAQDILAAAKYNQQLDRYKSQKANPSVLGNQGFTWTNAVILPEKAQRNDRPNSLDLRIWLYLKLRHPDGRWKKHHIPFYDTRFFQEIYAAGNSPVDTCQFRTPRFGYHLPKLTDQTAIRVNKKHVKAAKTEARIRLAIQQGTLPVSNLKITEISATINSKGQVRIPVKFDVGRQKGTLQIGDRFCGYDQNQTASHAYSLWEVVKEGQYHKELGCFVRFISSGDIVSITENRGNQFDQLSYEGLAYPQYADWRKKASKFVSLWQITKKNKKKEIVTVEAKEKFDAICKYQPRLYKFNKEYAYLLRDIVRGKSLVELQQIRQEIFRFIEQDCGVTRLGSLSLSTLETVKAVKGIIYSYFSTALNASKNNPISDEQRKEFDPELFALLEKLELIRTRKKKQKVERIANSLIQTCLENNIKFIRGEGDLSTTNNATKKKANSRSMDWLARGVFNKIRQLAPMHNITLFGCGSLYTSHQDPLVHRNPDKAMKCRWAAIPVKDIGDWVLRKLSQNLRAKNIGTGEYYHQGVKEFLSHYELQDLEEELLKWRSDRKSNIPCWVLQNRLAEKLGNKEAVVYIPVRGGRIYFATHKVATGAVSIVFDQKQVWVCNADHVAAANIALTVKGIGEQSSDEENPDGSRIKLQLTS

SEQ ID NO: 246 - protein, 4 aa, synthetic construct
  REGION 1..4: note = synthetic peptide sequence
GGGS

SEQ ID NO: 247 - protein, 5 aa, synthetic construct
  REGION 1..5: note = synthetic peptide sequence
GGGGS

SEQ ID NO: 248 - protein, 5 aa, synthetic construct
  REGION 1..5: note = synthetic peptide sequence
EAAAK

SEQ ID NO: 249 - protein, 16 aa, synthetic construct
  REGION 1..16: note = synthetic peptide sequence
SGSETPGTSESATPES

SEQ ID NO: 250 - protein, 6 aa, synthetic construct
  REGION 1..6: note = linker peptide sequence
GGSGGS

SEQ ID NO: 251 - protein, 20 aa, synthetic construct
  REGION 1..20: note = synthetic peptide sequence
GSSGSETPGTSESATPESSG

SEQ ID NO: 252 - DNA, 18 bp, synthetic construct
  misc_feature 1..18: note = synthetic oligonucleotide sequence
  source 1..18: mol_type = other DNA
ggaggctctggaggaagc

SEQ ID NO: 253 - DNA, 60 bp, synthetic construct
  misc_feature 1..60: note = synthetic oligonucleotide sequence
  source 1..60: mol_type = other DNA
ggctcttctggatctgaaacacctggcacaagcgagagcgccacccctgagagctctggc

SEQ ID NO: 254 - protein, 1129 aa, Alicyclobacillus acidiphilus
  REGION 1..1129: note = MISC_FEATURE - AacCas12b polypeptide sequence
MAVKSMKVKLRLDNMPEIRAGLWKLHTEVNAGVRYYTEWLSLLRQENLYRRSPNGDGEQECYKTAEECKAELLERLRARQVENGHCGPAGSDDELLQLARQLYELLVPQAIGAKGDAQQIARKFLSPLADKDAVGGLGIAKAGNKPRWVRMREAGEPGWEEEKAKAEARKSTDRTADVLRALADFGLKPLMRVYTDSDMSSVQWKPLRKGQAVRTWDRDMFQQAIERMMSWESWNQRVGEAYAKLVEQKSRFEQKNFVGQEHLVQLVNQLQQDMKEASHGLESKEQTAHYLTGRALRGSDKVFEKWEKLDPDAPFDLYDTEIKNVQRRNTRRFGSHDLFAKLAEPKYQALWREDASFLTRYAVYNSIVRKLNHAKMFATFTLPDATAHPIWTRFDKLGGNLHQYTFLFNEFGEGRHAIRFQKLLTVEDGVAKEVDDVTVPISMSAQLDDLLPRDPHELVALYFQDYGAEQHLAGEFGGAKIQYRRDQLNHLHARRGARDVYLNLSVRVQSQSEARGERRPPYAAVFRLVGDNHRAFVHFDKLSDYLAEHPDDGKLGSEGLLSGLRVMSVDLGLRTSASISVFRVARKDELKPNSEGRVPFCFPIEGNENLVAVHERSQLLKLPGETESKDLRAIREERQRTLRQLRTQLAYLRLLVRCGSEDVGRRERSWAKLIEQPMDANQMTPDWREAFEDELQKLKSLYGICGDREWTEAVYESVRRVWRHMGKQVRDWRKDVRSGERPKIRGYQKDVVGGNSIEQIEYLERQYKFLKSWSFFGKVSGQVIRAEKGSRFAITLREHIDHAKEDRLKKLADRIIMEALGYVYALDDERGKGKWVAKYPPCQLILLEELSEYQFNNDRPPSENNQLMQWSHRGVFQELLNQAQVHDLLVGTMYAAFSSRFDARTGAPGIRCRRVPARCAREQNPEPFPWWLNKFVAEHKLDGCPLRADDLIPTGEGEFFVSPFSAEEGDFHQIHADLNAAQNLQRRLWSDFDISQIRLRCDWGEVDGEPVLIPRTTGKRTADSYGNKVFYTKTGVTYYERERGKKRRKVFAQEELSEEEAELLVEADEAREKSVVLMRDPSGIINRGDWTRQKEFWSMVNQRIEGYLVKQIRSRVRLQESACENTGDI

SEQ ID NO: 255 - protein, 1140 aa, Bacillus hisashii
  REGION 1..1140: note = MISC_FEATURE - BhCas12b polypeptide sequence
MAPKKKRKVGIHGVPAAATRSFILKIEPNEEVKKGLWKTHEVLNHGIAYYMNILKLIRQEAIYEHHEQDPKNPKKVSKAEIQAELWDFVLKMQKCNSFTHEVDKDEVFNILRELYEELVPSSVEKKGEANQLSNKFLYPLVDPNSQSGKGTASSGRKPRWYNLKIAGDPSWEEEKKKWEEDKKKDPLAKILGKLAEYGLIPLFIPYTDSNEPIVKEIKWMEKSRNQSVRRLDKDMFIQALERFLSWESWNLKVKEEYEKVEKEYKTLEERIKEDIQALKALEQYEKERQEQLLRDTLNTNEYRLSKRGLRGWREIIQKWLKMDENEPSEKYLEVFKDYQRKHPREAGDYSVYEFLSKKENHFIWRNHPEYPYLYATFCEIDKKKKDAKQQATFTLADPINHPLWVRFEERSGSNLNKYRILTEQLHTEKLKKKLTVQLDRLIYPTESGGWEEKGKVDIVLLPSRQFYNQIFLDIEEKGKHAFTYKDESIKFPLKGTLGGARVQFDRDHLRRYPHKVESGNVGRIYFNMTVNIEPTESPVSKSLKIHRDDFPKVVNFKPKELTEWIKDSKGKKLKSGIESLEIGLRVMSIDLGQRQAAAASIFEVVDQKPDIEGKLFFPIKGTELYAVHRASFNIKLPGETLVKSREVLRKAREDNLKLMNQKLNFLRNVLHFQQFEDITEREKRVTKWISRQENSDVPLVYQDELIQIRELMYKPYKDWVAFLKQLHKRLEVEIGKEVKHWRKSLSDGRKGLYGISLKNIDEIDRTRKFLLRWSLRPTEPGEVRRLEPGQRFAIDQLNHLNALKEDRLKKMANTIIMHALGYCYDVRKKKWQAKNPACQIILFEDLSNYNPYEERSRFENSKLMKWSRREIPRQVALQGEIYGLQVGEVGAQFSSRFHAKTGSPGIRCSVVTKEKLQDNRFFKNLQREGRLTLDKIAVLKEGDLYPDKGGEKFISLSKDRKCVTTHADINAAQNLQKRFWTRTHGFYKVYCKAYQVDGQTVYIPESKDQKQKIIEEFGEGYFILKDGVYEWVNAGKLKIKKGSSKQSSSELVDSDILKDSFDLASELKGEKLMLYRDPSGNVFPSDKWMAAGVFFGKLERILISKLTNQYSISTIEDDSSKQSMKRPAATKKAGQAKKKK

SEQ ID NO: 256 - protein, 1108 aa, Bacillus thermoamylovorans
  REGION 1..1108: note = MISC_FEATURE - BTCas12b polypeptide sequence
MATRSFILKIEPNEEVKKGLWKTHEVLNHGIAYYMNILKLIRQEAIYEHHEQDPKNPKKVSKAEIQAELWDFVLKMQKCNSFTHEVDKDVVFNILRELYEELVPSSVEKKGEANQLSNKFLYPLVDPNSQSGKGTASSGRKPRWYNLKIAGDPSWEEEKKKWEEDKKKDPLAKILGKLAEYGLIPLFIPFTDSNEPIVKEIKWMEKSRNQSVRRLDKDMFIQALERFLSWESWNLKVKEEYEKVEKEHKTLEERIKEDIQAFKSLEQYEKERQEQLLRDTLNTNEYRLSKRGLRGWREIIQKWLKMDENEPSEKYLEVFKDYQRKHPREAGDYSVYEFLSKKENHFIWRNHPEYPYLYATFCEIDKKKKDAKQQATFTLADPINHPLWVRFEERSGSNLNKYRILTEQLHTEKLKKKLTVQLDRLIYPTESGGWEEKGKVDIVLLPSRQFYNQIFLDIEEKGKHAFTYKDESIKFPLKGTLGGARVQFDRDHLRRYPHKVESGNVGRIYFNMTVNIEPTESPVSKSLKIHRDDFPKFVNFKPKELTEWIKDSKGKKLKSGIESLEIGLRVMSIDLGQRQAAAASIFEVVDQKPDIEGKLFFPIKGTELYAVHRASFNIKLPGETLVKSREVLRKAREDNLKLMNQKLNFLRNVLHFQQFEDITEREKRVTKWISRQENSDVPLVYQDELIQIRELMYKPYKDWVAFLKQLHKRLEVEIGKEVKHWRKSLSDGRKGLYGISLKNIDEIDRTRKFLLRWSLRPTEPGEVRRLEPGQRFAIDQLNHLNALKEDRLKKMANTIIMHALGYCYDVRKKKWQAKNPACQIILFEDLSNYNPYEERSRFENSKLMKWSRREIPRQVALQGEIYGLQVGEVGAQFSSRFHAKTGSPGIRCSVVTKEKLQDNRFFKNLQREGRLTLDKIAVLKEGDLYPDKGGEKFISLSKDRKLVTTHADINAAQNLQKRFWTRTHGFYKVYCKAYQVDGQTVYIPESKDQKQKIIEEFGEGYFILKDGVYEWGNAGKLKIKKGSSKQSSSELVDSDILKDSFDLASELKGEKLMLYRDPSGNVFPSDKWMAAGVFFGKLERILISKLTNQYSISTIEDDSSKQSM

SEQ ID NO: 257 - protein, 1112 aa, Bacillus sp.
  REGION 1..1112: note = MISC_FEATURE - BvCas12b (Bacillus sp. V3-13) polypeptide sequence
MAIRSIKLKMKTNSGTDSIYLRKALWRTHQLINEGIAYYMNLLTLYRQEAIGDKTKEAYQAELINIIRNQQRNNGSSEEHGSDQEILALLRQLYELIIPSSIGESGDANQLGNKFLYPLVDPNSQSGKGTSNAGRKPRWKRLKEEGNPDWELEKKKDEERKAKDPTVKIFDNLNKYGLLPLFPLFTNIQKDIEWLPLGKRQSVRKWDKDMFIQAIERLLSWESWNRRVADEYKQLKEKTESYYKEHLTGGEEWIEKIRKFEKERNMELEKNAFAPNDGYFITSRQIRGWDRVYEKWSKLPESASPEELWKVVAEQQNKMSEGFGDPKVFSFLANRENRDIWRGHSERIYHIAAYNGLQKKLSRTKEQATFTLPDAIEHPLWIRYESPGGTNLNLFKLEEKQKKNYYVTLSKIIWPSEEKWIEKENIEIPLAPSIQFNRQIKLKQHVKGKQEISFSDYSSRISLDGVLGGSRIQFNRKYIKNHKELLGEGDIGPVFFNLVVDVAPLQETRNGRLQSPIGKALKVISSDFSKVIDYKPKELMDWMNTGSASNSFGVASLLEGMRVMSIDMGQRTSASVSIFEVVKELPKDQEQKLFYSINDTELFAIHKRSFLLNLPGEVVTKNNKQQRQERRKKRQFVRSQIRMLANVLRLETKKTPDERKKAIHKLMEIVQSYDSWTASQKEVWEKELNLLTNMAAFNDEIWKESLVELHHRIEPYVGQIVSKWRKGLSEGRKNLAGISMWNIDELEDTRRLLISWSKRSRTPGEANRIETDEPFGSSLLQHIQNVKDDRLKQMANLIIMTALGFKYDKEEKDRYKRWKETYPACQIILFENLNRYLFNLDRSRRENSRLMKWAHRSIPRTVSMQGEMFGLQVGDVRSEYSSRFHAKTGAPGIRCHALTEEDLKAGSNTLKRLIEDGFINESELAYLKKGDIIPSQGGELFVTLSKRYKKDSDNNELTVIHADINAAQNLQKRFWQQNSEVYRVPCQLARMGEDKLYIPKSQTETIKKYFGKGSFVKNNTEQEVYKWEKSEKMKIKTDTTFDLQDLDGFEDISKTIELAQEQQKKYLTMFRDPSGYFFNNETWRPQKEYWSIVNNIIKSCLKKKILSNKVEL

SEQ ID NO: 258 - DNA, 47 bp, synthetic construct
  misc_feature 1..47: note = 5'UTR oligonucleotide sequence
  source 1..47: mol_type = other DNA
gggaaataagagagaaaagaagagtaagaagaaatataagagccacc

SEQ ID NO: 259 - DNA, 101 bp, synthetic construct
  misc_feature 1..101: note = 3'UTR (TriLink standard UTR)polynucleotide sequence
  source 1..101: mol_type = other DNA
gctggagcctcggtggccatgcttcttgccccttgggcctccccccagcccctcctccccttcctgcacccgtacccccgtggtctttgaataaagtctga

SEQ ID NO: 260 - DNA, 3420 bp, Bacillus hisashii
  misc_feature 1..3420: note = bhCas12b (V4) polynucleotide sequence
  source 1..3420: mol_type = genomic DNA
atggccccaaagaagaagcggaaggtcggtatccacggagtcccagcagccgccaccagatccttcatcctgaagatcgagcccaacgaggaagtgaagaaaggcctctggaaaacccacgaggtgctgaaccacggaatcgcctactacatgaatatcctgaagctgatccggcaagaggccatctacgagcaccacgagcaggaccccaagaatcccaagaaggtgtccaaggccgagatccaggccgagctgtgggatttcgtgctgaagatgcagaagtgcaacagcttcacacacgaggtggacaaggacgaggtgttcaacatcctgagagagctgtacgaggaactggtgcccagcagcgtggaaaagaagggcgaagccaaccagctgagcaacaagtttctgtaccctctggtggaccccaacagccagtctggaaagggaacagccagcagcggcagaaagcccagatggtacaacctgaagattgccggcgatccctcctgggaagaagagaagaagaagtgggaagaagataagaaaaaggacccgctggccaagatcctgggcaagctggctgagtacggactgatccctctgttcatcccctacaccgacagcaacgagcccatcgtgaaagaaatcaagtggatggaaaagtcccggaaccagagcgtgcggcggctggataaggacatgttcattcaggccctggaacggttcctgagctgggagagctggaacctgaaagtgaaagaggaatacgagaaggtcgagaaagagtacaagaccctggaagagaggatcaaagaggacatccaggctctgaaggctctggaacagtatgagaaagagcggcaagaacagctgctgcgggacaccctgaacaccaacgagtaccggctgagcaagagaggccttagaggctggcgggaaatcatccagaaatggctgaaaatggacgagaacgagccctccgagaagtacctggaagtgttcaaggactaccagcggaagcaccctagagaggccggcgattacagcgtgtacgagttcctgtccaagaaagagaaccacttcatctggcggaatcaccctgagtacccctacctgtacgccaccttctgcgagatcgacaagaaaaagaaggacgccaagcagcaggccaccttcacactggccgatcctatcaatcaccctctgtgggtccgattcgaggaaagaagcggcagcaacctgaacaagtacagaatcctgaccgagcagctgcacaccgagaagctgaagaaaaagctgacagtgcagctggaccggctgatctaccctacagaatctggcggctgggaagagaagggcaaagtggacattgtgctgctgcccagccggcagttctacaaccagatcttcctggacatcgaggaaaagggcaagcacgccttcacctacaaggatgagagcatcaagttccctctgaagggcacactcggcggagccagagtgcagttcgacagagatcacctgagaagataccctcacaaggtggaaagcggcaacgtgggcagaatctacttcaacatgaccgtgaacatcgagcctacagagtccccagtgtccaagtctctgaagatccaccgggacgacttccccaaggtggtcaacttcaagcccaaagaactgaccgagtggatcaaggacagcaagggcaagaaactgaagtccggcatcgagtccctggaaatcggcctgagagtgatgagcatcgacctgggacagagacaggccgctgccgcctctattttcgaggtggtggatcagaagcccgacatcgaaggcaagctgtttttcccaatcaagggcaccgagctgtatgccgtgcacagagccagcttcaacatcaagctgcccggcgagacactggtcaagagcagagaagtgctgcggaaggccagagaggacaatctgaaactgatgaaccagaagctcaacttcctgcggaacgtgctgcacttccagcagttcgaggacatcaccgagagagagaagcgggtcaccaagtggatcagcagacaagagaacagcgacgtgcccctggtgtaccaggatgagctgatccagatccgcgagctgatgtacaagccttacaaggactgggtcgccttcctgaagcagctccacaagagactggaagtcgagatcggcaaagaagtgaagcactggcggaagtccctgagcgacggaagaaagggcctgtacggcatctccctgaagaacatcgacgagatcgatcggacccggaagttcctgctgagatggtccctgaggcctaccgaacctggcgaagtgcgtagactggaacccggccagagattcgccatcgaccagctgaatcacctgaacgccctgaaagaagatcggctgaagaagatggccaacaccatcatcatgcacgccctgggctactgctacgacgtgcggaagaagaaatggcaggctaagaaccccgcctgccagatcatcctgttcgaggatctgagcaactacaacccctacgaggaaaggtcccgcttcgagaacagcaagctcatgaagtggtccagacgcgagatccccagacaggttgcactgcagggcgagatctatggcctgcaagtgggagaagtgggcgctcagttcagcagcagattccacgccaagacaggcagccctggcatcagatgtagcgtcgtgaccaaagagaagctgcaggacaatcggttcttcaagaatctgcagagagagggcagactgaccctggacaaaatcgccgtgctgaaagagggcgatctgtacccagacaaaggcggcgagaagttcatcagcctgagcaaggatcggaagtgcgtgaccacacacgccgacatcaacgccgctcagaacctgcagaagcggttctggacaagaacccacggcttctacaaggtgtactgcaaggcctaccaggtggacggccagaccgtgtacatccctgagagcaaggaccagaagcagaagatcatcgaagagttcggcgagggctacttcattctgaaggacggggtgtacgaatgggtcaacgccggcaagctgaaaatcaagaagggcagctccaagcagagcagcagcgagctggtggatagcgacatcctgaaagacagcttcgacctggcctccgagctgaaaggcgaaaagctgatgctgtacagggaccccagcggcaatgtgttccccagcgacaaatggatggccgctggcgtgttcttcggaaagctggaacgcatcctgatcagcaagctgaccaaccagtactccatcagcaccatcgaggacgacagcagcaagcagtctatgaaaaggccggcggccacgaaaaaggccggccaggcaaaaaagaaaaag

SEQ ID NO: 261 - protein, 17 aa, synthetic construct
  REGION 1..17: note = synthetic peptide sequence
MAPKKKRKVGIHGVPAA

SEQ ID NO: 262 - DNA, 51 bp, synthetic construct
  misc_feature 1..51: note = synthetic oligonucleotide sequence
  source 1..51: mol_type = other DNA
atggccccaaagaagaagcggaaggtcggtatccacggagtcccagcagcc

SEQ ID NO: 263 - protein, 1554 aa, synthetic construct
  REGION 1..1554: note = 101 Cas9 TadAins 1015 polypeptide sequence
MDKKYSIGLAIGTNSVGWAVITDEYKVPSKKFKVLGNTDRHSIKKNLIGALLFDSGETAEATRLKRTARRRYTRRKNRICYLQEIFSNEMAKVDDSFFHRLEESFLVEEDKKHERHPIFGNIVDEVAYHEKYPTIYHLRKKLVDSTDKADLRLIYLALAHMIKFRGHFLIEGDLNPDNSDVDKLFIQLVQTYNQLFEENPINASGVDAKAILSARLSKSRRLENLIAQLPGEKKNGLFGNLIALSLGLTPNFKSNFDLAEDAKLQLSKDTYDDDLDNLLAQIGDQYADLFLAAKNLSDAILLSDILRVNTEITKAPLSASMIKRYDEHHQDLTLLKALVRQQLPEKYKEIFFDQSKNGYAGYIDGGASQEEFYKFIKPILEKMDGTEELLVKLNREDLLRKQRTFDNGSIPHQIHLGELHAILRRQEDFYPFLKDNREKIEKILTFRIPYYVGPLARGNSRFAWMTRKSEETITPWNFEEVVDKGASAQSFIERMTNFDKNLPNEKVLPKHSLLYEYFTVYNELTKVKYVTEGMRKPAFLSGEQKKAIVDLLFKTNRKVTVKQLKEDYFKKIECFDSVEISGVEDRFNASLGTYHDLLKIIKDKDFLDNEENEDILEDIVLTLTLFEDREMIEERLKTYAHLFDDKVMKQLKRRRYTGWGRLSRKLINGIRDKQSGKTILDFLKSDGFANRNFMQLIHDDSLTFKEDIQKAQVSGQGDSLHEHIANLAGSPAIKKGILQTVKVVDELVKVMGRHKPENIVIEMARENQTTQKGQKNSRERMKRIEEGIKELGSQILKEHPVENTQLQNEKLYLYYLQNGRDMYVDQELDINRLSDYDVDHIVPQSFLKDDSIDNKVLTRSDKNRGKSDNVPSEEVVKKMKNYWRQLLNAKLITQRKFDNLTKAERGGLSELDKAGFIKRQLVETRQITKHVAQILDSRMNTKYDENDKLIREVKVITLKSKLVSDFRKDFQFYKVREINNYHHAHDAYLNAVVGTALIKKYPKLESEFVYGDYKVGSSGSETPGTSESATPESSGSEVEFSHEYWMRHALTLAKRARDEREVPVGAVLVLNNRVIGEGWNRAIGLHDPTAHAEIMALRQGGLVMQNYRLIDATLYVTFEPCVMCAGAMIHSRIGRVVFGVRNAKTGAAGSLMDVLHYPGMNHRVEITEGILADECAALLCYFFRMPRQVFNAQKKAQSSTDYDVRKMIAKSEQEIGKATAKYFFYSNIMNFFKTEITLANGEIRKRPLIETNGETGEIVWDKGRDFATVRKVLSMPQVNIVKKTEVQTGGFSKESILPKRNSDKLIARKKDWDPKKYGGFDSPTVAYSVLVVAKVEKGKSKKLKSVKELLGITIMERSSFEKNPIDFLEAKGYKEVKKDLIIKLPKYSLFELENGRKRMLASAGELQKGNELALPSKYVNFLYLASHYEKLKGSPEDNEQKQLFVEQHKHYLDEIIEQISEFSKRVILADANLDKVLSAYNKHRDKPIREQAENIIHLFTLTNLGAPAAFKYFDTTIDRKRYTSTKEVLDATLIHQSITGLYETRIDLSQLGGD

SEQ ID NO: 264 - protein, 1554 aa, synthetic construct
  REGION 1..1554: note = 102 Cas9 TadAins 1022 polypeptide sequence
MDKKYSIGLAIGTNSVGWAVITDEYKVPSKKFKVLGNTDRHSIKKNLIGALLFDSGETAEATRLKRTARRRYTRRKNRICYLQEIFSNEMAKVDDSFFHRLEESFLVEEDKKHERHPIFGNIVDEVAYHEKYPTIYHLRKKLVDSTDKADLRLIYLALAHMIKFRGHFLIEGDLNPDNSDVDKLFIQLVQTYNQLFEENPINASGVDAKAILSARLSKSRRLENLIAQLPGEKKNGLFGNLIALSLGLTPNFKSNFDLAEDAKLQLSKDTYDDDLDNLLAQIGDQYADLFLAAKNLSDAILLSDILRVNTEITKAPLSASMIKRYDEHHQDLTLLKALVRQQLPEKYKEIFFDQSKNGYAGYIDGGASQEEFYKFIKPILEKMDGTEELLVKLNREDLLRKQRTFDNGSIPHQIHLGELHAILRRQEDFYPFLKDNREKIEKILTFRIPYYVGPLARGNSRFAWMTRKSEETITPWNFEEVVDKGASAQSFIERMTNFDKNLPNEKVLPKHSLLYEYFTVYNELTKVKYVTEGMRKPAFLSGEQKKAIVDLLFKTNRKVTVKQLKEDYFKKIECFDSVEISGVEDRFNASLGTYHDLLKIIKDKDFLDNEENEDILEDIVLTLTLFEDREMIEERLKTYAHLFDDKVMKQLKRRRYTGWGRLSRKLINGIRDKQSGKTILDFLKSDGFANRNFMQLIHDDSLTFKEDIQKAQVSGQGDSLHEHIANLAGSPAIKKGILQTVKVVDELVKVMGRHKPENIVIEMARENQTTQKGQKNSRERMKRIEEGIKELGSQILKEHPVENTQLQNEKLYLYYLQNGRDMYVDQELDINRLSDYDVDHIVPQSFLKDDSIDNKVLTRSDKNRGKSDNVPSEEVVKKMKNYWRQLLNAKLITQRKFDNLTKAERGGLSELDKAGFIKRQLVETRQITKHVAQILDSRMNTKYDENDKLIREVKVITLKSKLVSDFRKDFQFYKVREINNYHHAHDAYLNAVVGTALIKKYPKLESEFVYGDYKVYDVRKMIGSSGSETPGTSESATPESSGSEVEFSHEYWMRHALTLAKRARDEREVPVGAVLVLNNRVIGEGWNRAIGLHDPTAHAEIMALRQGGLVMQNYRLIDATLYVTFEPCVMCAGAMIHSRIGRVVFGVRNAKTGAAGSLMDVLHYPGMNHRVEITEGILADECAALLCYFFRMPRQVFNAQKKAQSSTDAKSEQEIGKATAKYFFYSNIMNFFKTEITLANGEIRKRPLIETNGETGEIVWDKGRDFATVRKVLSMPQVNIVKKTEVQTGGFSKESILPKRNSDKLIARKKDWDPKKYGGFDSPTVAYSVLVVAKVEKGKSKKLKSVKELLGITIMERSSFEKNPIDFLEAKGYKEVKKDLIIKLPKYSLFELENGRKRMLASAGELQKGNELALPSKYVNFLYLASHYEKLKGSPEDNEQKQLFVEQHKHYLDEIIEQISEFSKRVILADANLDKVLSAYNKHRDKPIREQAENIIHLFTLTNLGAPAAFKYFDTTIDRKRYTSTKEVLDATLIHQSITGLYETRIDLSQLGGD

SEQ ID NO: 265 - protein, 1554 aa, synthetic construct
  REGION 1..1554: note = 103 Cas9 TadAins 1029 polypeptide sequence
MDKKYSIGLAIGTNSVGWAVITDEYKVPSKKFKVLGNTDRHSIKKNLIGALLFDSGETAEATRLKRTARRRYTRRKNRICYLQEIFSNEMAKVDDSFFHRLEESFLVEEDKKHERHPIFGNIVDEVAYHEKYPTIYHLRKKLVDSTDKADLRLIYLALAHMIKFRGHFLIEGDLNPDNSDVDKLFIQLVQTYNQLFEENPINASGVDAKAILSARLSKSRRLENLIAQLPGEKKNGLFGNLIALSLGLTPNFKSNFDLAEDAKLQLSKDTYDDDLDNLLAQIGDQYADLFLAAKNLSDAILLSDILRVNTEITKAPLSASMIKRYDEHHQDLTLLKALVRQQLPEKYKEIFFDQSKNGYAGYIDGGASQEEFYKFIKPILEKMDGTEELLVKLNREDLLRKQRTFDNGSIPHQIHLGELHAILRRQEDFYPFLKDNREKIEKILTFRIPYYVGPLARGNSRFAWMTRKSEETITPWNFEEVVDKGASAQSFIERMTNFDKNLPNEKVLPKHSLLYEYFTVYNELTKVKYVTEGMRKPAFLSGEQKKAIVDLLFKTNRKVTVKQLKEDYFKKIECFDSVEISGVEDRFNASLGTYHDLLKIIKDKDFLDNEENEDILEDIVLTLTLFEDREMIEERLKTYAHLFDDKVMKQLKRRRYTGWGRLSRKLINGIRDKQSGKTILDFLKSDGFANRNFMQLIHDDSLTFKEDIQKAQVSGQGDSLHEHIANLAGSPAIKKGILQTVKVVDELVKVMGRHKPENIVIEMARENQTTQKGQKNSRERMKRIEEGIKELGSQILKEHPVENTQLQNEKLYLYYLQNGRDMYVDQELDINRLSDYDVDHIVPQSFLKDDSIDNKVLTRSDKNRGKSDNVPSEEVVKKMKNYWRQLLNAKLITQRKFDNLTKAERGGLSELDKAGFIKRQLVETRQITKHVAQILDSRMNTKYDENDKLIREVKVITLKSKLVSDFRKDFQFYKVREINNYHHAHDAYLNAVVGTALIKKYPKLESEFVYGDYKVYDVRKMIAKSEQEIGSSGSETPGTSESATPESSGSEVEFSHEYWMRHALTLAKRARDEREVPVGAVLVLNNRVIGEGWNRAIGLHDPTAHAEIMALRQGGLVMQNYRLIDATLYVTFEPCVMCAGAMIHSRIGRVVFGVRNAKTGAAGSLMDVLHYPGMNHRVEITEGILADECAALLCYFFRMPRQVFNAQKKAQSSTDGKATAKYFFYSNIMNFFKTEITLANGEIRKRPLIETNGETGEIVWDKGRDFATVRKVLSMPQVNIVKKTEVQTGGFSKESILPKRNSDKLIARKKDWDPKKYGGFDSPTVAYSVLVVAKVEKGKSKKLKSVKELLGITIMERSSFEKNPIDFLEAKGYKEVKKDLIIKLPKYSLFELENGRKRMLASAGELQKGNELALPSKYVNFLYLASHYEKLKGSPEDNEQKQLFVEQHKHYLDEIIEQISEFSKRVILADANLDKVLSAYNKHRDKPIREQAENIIHLFTLTNLGAPAAFKYFDTTIDRKRYTSTKEVLDATLIHQSITGLYETRIDLSQLGGD

SEQ ID NO: 266 - protein, 1554 aa, synthetic construct
  REGION 1..1554: note = 103 Cas9 TadAins 1040 polypeptide sequence
MDKKYSIGLAIGTNSVGWAVITDEYKVPSKKFKVLGNTDRHSIKKNLIGALLFDSGETAEATRLKRTARRRYTRRKNRICYLQEIFSNEMAKVDDSFFHRLEESFLVEEDKKHERHPIFGNIVDEVAYHEKYPTIYHLRKKLVDSTDKADLRLIYLALAHMIKFRGHFLIEGDLNPDNSDVDKLFIQLVQTYNQLFEENPINASGVDAKAILSARLSKSRRLENLIAQLPGEKKNGLFGNLIALSLGLTPNFKSNFDLAEDAKLQLSKDTYDDDLDNLLAQIGDQYADLFLAAKNLSDAILLSDILRVNTEITKAPLSASMIKRYDEHHQDLTLLKALVRQQLPEKYKEIFFDQSKNGYAGYIDGGASQEEFYKFIKPILEKMDGTEELLVKLNREDLLRKQRTFDNGSIPHQIHLGELHAILRRQEDFYPFLKDNREKIEKILTFRIPYYVGPLARGNSRFAWMTRKSEETITPWNFEEVVDKGASAQSFIERMTNFDKNLPNEKVLPKHSLLYEYFTVYNELTKVKYVTEGMRKPAFLSGEQKKAIVDLLFKTNRKVTVKQLKEDYFKKIECFDSVEISGVEDRFNASLGTYHDLLKIIKDKDFLDNEENEDILEDIVLTLTLFEDREMIEERLKTYAHLFDDKVMKQLKRRRYTGWGRLSRKLINGIRDKQSGKTILDFLKSDGFANRNFMQLIHDDSLTFKEDIQKAQVSGQGDSLHEHIANLAGSPAIKKGILQTVKVVDELVKVMGRHKPENIVIEMARENQTTQKGQKNSRERMKRIEEGIKELGSQILKEHPVENTQLQNEKLYLYYLQNGRDMYVDQELDINRLSDYDVDHIVPQSFLKDDSIDNKVLTRSDKNRGKSDNVPSEEVVKKMKNYWRQLLNAKLITQRKFDNLTKAERGGLSELDKAGFIKRQLVETRQITKHVAQILDSRMNTKYDENDKLIREVKVITLKSKLVSDFRKDFQFYKVREINNYHHAHDAYLNAVVGTALIKKYPKLESEFVYGDYKVYDVRKMIAKSEQEIGKATAKYFFYSGSSGSETPGTSESATPESSGSEVEFSHEYWMRHALTLAKRARDEREVPVGAVLVLNNRVIGEGWNRAIGLHDPTAHAEIMALRQGGLVMQNYRLIDATLYVTFEPCVMCAGAMIHSRIGRVVFGVRNAKTGAAGSLMDVLHYPGMNHRVEITEGILADECAALLCYFFRMPRQVFNAQKKAQSSTDNIMNFFKTEITLANGEIRKRPLIETNGETGEIVWDKGRDFATVRKVLSMPQVNIVKKTEVQTGGFSKESILPKRNSDKLIARKKDWDPKKYGGFDSPTVAYSVLVVAKVEKGKSKKLKSVKELLGITIMERSSFEKNPIDFLEAKGYKEVKKDLIIKLPKYSLFELENGRKRMLASAGELQKGNELALPSKYVNFLYLASHYEKLKGSPEDNEQKQLFVEQHKHYLDEIIEQISEFSKRVILADANLDKVLSAYNKHRDKPIREQAENIIHLFTLTNLGAPAAFKYFDTTIDRKRYTSTKEVLDATLIHQSITGLYETRIDLSQLGGD

SEQ ID NO: 267 - protein, 1554 aa, synthetic construct
  REGION 1..1554: note = 105 Cas9 TadAins 1068 polypeptide sequence
MDKKYSIGLAIGTNSVGWAVITDEYKVPSKKFKVLGNTDRHSIKKNLIGALLFDSGETAEATRLKRTARRRYTRRKNRICYLQEIFSNEMAKVDDSFFHRLEESFLVEEDKKHERHPIFGNIVDEVAYHEKYPTIYHLRKKLVDSTDKADLRLIYLALAHMIKFRGHFLIEGDLNPDNSDVDKLFIQLVQTYNQLFEENPINASGVDAKAILSARLSKSRRLENLIAQLPGEKKNGLFGNLIALSLGLTPNFKSNFDLAEDAKLQLSKDTYDDDLDNLLAQIGDQYADLFLAAKNLSDAILLSDILRVNTEITKAPLSASMIKRYDEHHQDLTLLKALVRQQLPEKYKEIFFDQSKNGYAGYIDGGASQEEFYKFIKPILEKMDGTEELLVKLNREDLLRKQRTFDNGSIPHQIHLGELHAILRRQEDFYPFLKDNREKIEKILTFRIPYYVGPLARGNSRFAWMTRKSEETITPWNFEEVVDKGASAQSFIERMTNFDKNLPNEKVLPKHSLLYEYFTVYNELTKVKYVTEGMRKPAFLSGEQKKAIVDLLFKTNRKVTVKQLKEDYFKKIECFDSVEISGVEDRFNASLGTYHDLLKIIKDKDFLDNEENEDILEDIVLTLTLFEDREMIEERLKTYAHLFDDKVMKQLKRRRYTGWGRLSRKLINGIRDKQSGKTILDFLKSDGFANRNFMQLIHDDSLTFKEDIQKAQVSGQGDSLHEHIANLAGSPAIKKGILQTVKVVDELVKVMGRHKPENIVIEMARENQTTQKGQKNSRERMKRIEEGIKELGSQILKEHPVENTQLQNEKLYLYYLQNGRDMYVDQELDINRLSDYDVDHIVPQSFLKDDSIDNKVLTRSDKNRGKSDNVPSEEVVKKMKNYWRQLLNAKLITQRKFDNLTKAERGGLSELDKAGFIKRQLVETRQITKHVAQILDSRMNTKYDENDKLIREVKVITLKSKLVSDFRKDFQFYKVREINNYHHAHDAYLNAVVGTALIKKYPKLESEFVYGDYKVYDVRKMIAKSEQEIGKATAKYFFYSNIMNFFKTEITLANGEIRKRPLIETNGEGSSGSETPGTSESATPESSGSEVEFSHEYWMRHALTLAKRARDEREVPVGAVLVLNNRVIGEGWNRAIGLHDPTAHAEIMALRQGGLVMQNYRLIDATLYVTFEPCVMCAGAMIHSRIGRVVFGVRNAKTGAAGSLMDVLHYPGMNHRVEITEGILADECAALLCYFFRMPRQVFNAQKKAQSSTDTGEIVWDKGRDFATVRKVLSMPQVNIVKKTEVQTGGFSKESILPKRNSDKLIARKKDWDPKKYGGFDSPTVAYSVLVVAKVEKGKSKKLKSVKELLGITIMERSSFEKNPIDFLEAKGYKEVKKDLIIKLPKYSLFELENGRKRMLASAGELQKGNELALPSKYVNFLYLASHYEKLKGSPEDNEQKQLFVEQHKHYLDEIIEQISEFSKRVILADANLDKVLSAYNKHRDKPIREQAENIIHLFTLTNLGAPAAFKYFDTTIDRKRYTSTKEVLDATLIHQSITGLYETRIDLSQLGGD

SEQ ID NO: 268 - protein, 1554 aa, synthetic construct
  REGION 1..1554: note = 106 Cas9 TadAins 1247 polypeptide sequence
MDKKYSIGLAIGTNSVGWAVITDEYKVPSKKFKVLGNTDRHSIKKNLIGALLFDSGETAEATRLKRTARRRYTRRKNRICYLQEIFSNEMAKVDDSFFHRLEESFLVEEDKKHERHPIFGNIVDEVAYHEKYPTIYHLRKKLVDSTDKADLRLIYLALAHMIKFRGHFLIEGDLNPDNSDVDKLFIQLVQTYNQLFEENPINASGVDAKAILSARLSKSRRLENLIAQLPGEKKNGLFGNLIALSLGLTPNFKSNFDLAEDAKLQLSKDTYDDDLDNLLAQIGDQYADLFLAAKNLSDAILLSDILRVNTEITKAPLSASMIKRYDEHHQDLTLLKALVRQQLPEKYKEIFFDQSKNGYAGYIDGGASQEEFYKFIKPILEKMDGTEELLVKLNREDLLRKQRTFDNGSIPHQIHLGELHAILRRQEDFYPFLKDNREKIEKILTFRIPYYVGPLARGNSRFAWMTRKSEETITPWNFEEVVDKGASAQSFIERMTNFDKNLPNEKVLPKHSLLYEYFTVYNELTKVKYVTEGMRKPAFLSGEQKKAIVDLLFKTNRKVTVKQLKEDYFKKIECFDSVEISGVEDRFNASLGTYHDLLKIIKDKDFLDNEENEDILEDIVLTLTLFEDREMIEERLKTYAHLFDDKVMKQLKRRRYTGWGRLSRKLINGIRDKQSGKTILDFLKSDGFANRNFMQLIHDDSLTFKEDIQKAQVSGQGDSLHEHIANLAGSPAIKKGILQTVKVVDELVKVMGRHKPENIVIEMARENQTTQKGQKNSRERMKRIEEGIKELGSQILKEHPVENTQLQNEKLYLYYLQNGRDMYVDQELDINRLSDYDVDHIVPQSFLKDDSIDNKVLTRSDKNRGKSDNVPSEEVVKKMKNYWRQLLNAKLITQRKFDNLTKAERGGLSELDKAGFIKRQLVETRQITKHVAQILDSRMNTKYDENDKLIREVKVITLKSKLVSDFRKDFQFYKVREINNYHHAHDAYLNAVVGTALIKKYPKLESEFVYGDYKVYDVRKMIAKSEQEIGKATAKYFFYSNIMNFFKTEITLANGEIRKRPLIETNGETGEIVWDKGRDFATVRKVLSMPQVNIVKKTEVQTGGFSKESILPKRNSDKLIARKKDWDPKKYGGFDSPTVAYSVLVVAKVEKGKSKKLKSVKELLGITIMERSSFEKNPIDFLEAKGYKEVKKDLIIKLPKYSLFELENGRKRMLASAGELQKGNELALPSKYVNFLYLASHYEKLKGGSSGSETPGTSESATPESSGSEVEFSHEYWMRHALTLAKRARDEREVPVGAVLVLNNRVIGEGWNRAIGLHDPTAHAEIMALRQGGLVMQNYRLIDATLYVTFEPCVMCAGAMIHSRIGRVVFGVRNAKTGAAGSLMDVLHYPGMNHRVEITEGILADECAALLCYFFRMPRQVFNAQKKAQSSTDSPEDNEQKQLFVEQHKHYLDEIIEQISEFSKRVILADANLDKVLSAYNKHRDKPIREQAENIIHLFTLTNLGAPAAFKYFDTTIDRKRYTSTKEVLDATLIHQSITGLYETRIDLSQLGGD

SEQ ID NO: 269 - protein, 1554 aa, synthetic construct
  REGION 1..1554: note = 107 Cas9 TadAins 1054 polypeptide sequence
MDKKYSIGLAIGTNSVGWAVITDEYKVPSKKFKVLGNTDRHSIKKNLIGALLFDSGETAEATRLKRTARRRYTRRKNRICYLQEIFSNEMAKVDDSFFHRLEESFLVEEDKKHERHPIFGNIVDEVAYHEKYPTIYHLRKKLVDSTDKADLRLIYLALAHMIKFRGHFLIEGDLNPDNSDVDKLFIQLVQTYNQLFEENPINASGVDAKAILSARLSKSRRLENLIAQLPGEKKNGLFGNLIALSLGLTPNFKSNFDLAEDAKLQLSKDTYDDDLDNLLAQIGDQYADLFLAAKNLSDAILLSDILRVNTEITKAPLSASMIKRYDEHHQDLTLLKALVRQQLPEKYKEIFFDQSKNGYAGYIDGGASQEEFYKFIKPILEKMDGTEELLVKLNREDLLRKQRTFDNGSIPHQIHLGELHAILRRQEDFYPFLKDNREKIEKILTFRIPYYVGPLARGNSRFAWMTRKSEETITPWNFEEVVDKGASAQSFIERMTNFDKNLPNEKVLPKHSLLYEYFTVYNELTKVKYVTEGMRKPAFLSGEQKKAIVDLLFKTNRKVTVKQLKEDYFKKIECFDSVEISGVEDRFNASLGTYHDLLKIIKDKDFLDNEENEDILEDIVLTLTLFEDREMIEERLKTYAHLFDDKVMKQLKRRRYTGWGRLSRKLINGIRDKQSGKTILDFLKSDGFANRNFMQLIHDDSLTFKEDIQKAQVSGQGDSLHEHIANLAGSPAIKKGILQTVKVVDELVKVMGRHKPENIVIEMARENQTTQKGQKNSRERMKRIEEGIKELGSQILKEHPVENTQLQNEKLYLYYLQNGRDMYVDQELDINRLSDYDVDHIVPQSFLKDDSIDNKVLTRSDKNRGKSDNVPSEEVVKKMKNYWRQLLNAKLITQRKFDNLTKAERGGLSELDKAGFIKRQLVETRQITKHVAQILDSRMNTKYDENDKLIREVKVITLKSKLVSDFRKDFQFYKVREINNYHHAHDAYLNAVVGTALIKKYPKLESEFVYGDYKVYDVRKMIAKSEQEIGKATAKYFFYSNIMNFFKTEITLANGSSGSETPGTSESATPESSGSEVEFSHEYWMRHALTLAKRARDEREVPVGAVLVLNNRVIGEGWNRAIGLHDPTAHAEIMALRQGGLVMQNYRLIDATLYVTFEPCVMCAGAMIHSRIGRVVFGVRNAKTGAAGSLMDVLHYPGMNHRVEITEGILADECAALLCYFFRMPRQVFNAQKKAQSSTDGEIRKRPLIETNGETGEIVWDKGRDFATVRKVLSMPQVNIVKKTEVQTGGFSKESILPKRNSDKLIARKKDWDPKKYGGFDSPTVAYSVLVVAKVEKGKSKKLKSVKELLGITIMERSSFEKNPIDFLEAKGYKEVKKDLIIKLPKYSLFELENGRKRMLASAGELQKGNELALPSKYVNFLYLASHYEKLKGSPEDNEQKQLFVEQHKHYLDEIIEQISEFSKRVILADANLDKVLSAYNKHRDKPIREQAENIIHLFTLTNLGAPAAFKYFDTTIDRKRYTSTKEVLDATLIHQSITGLYETRIDLSQLGGD

SEQ ID NO: 270 - protein, 1554 aa, synthetic construct
  REGION 1..1554: note = 108 Cas9 TadAins 1026 polypeptide sequence
MDKKYSIGLAIGTNSVGWAVITDEYKVPSKKFKVLGNTDRHSIKKNLIGALLFDSGETAEATRLKRTARRRYTRRKNRICYLQEIFSNEMAKVDDSFFHRLEESFLVEEDKKHERHPIFGNIVDEVAYHEKYPTIYHLRKKLVDSTDKADLRLIYLALAHMIKFRGHFLIEGDLNPDNSDVDKLFIQLVQTYNQLFEENPINASGVDAKAILSARLSKSRRLENLIAQLPGEKKNGLFGNLIALSLGLTPNFKSNFDLAEDAKLQLSKDTYDDDLDNLLAQIGDQYADLFLAAKNLSDAILLSDILRVNTEITKAPLSASMIKRYDEHHQDLTLLKALVRQQLPEKYKEIFFDQSKNGYAGYIDGGASQEEFYKFIKPILEKMDGTEELLVKLNREDLLRKQRTFDNGSIPHQIHLGELHAILRRQEDFYPFLKDNREKIEKILTFRIPYYVGPLARGNSRFAWMTRKSEETITPWNFEEVVDKGASAQSFIERMTNFDKNLPNEKVLPKHSLLYEYFTVYNELTKVKYVTEGMRKPAFLSGEQKKAIVDLLFKTNRKVTVKQLKEDYFKKIECFDSVEISGVEDRFNASLGTYHDLLKIIKDKDFLDNEENEDILEDIVLTLTLFEDREMIEERLKTYAHLFDDKVMKQLKRRRYTGWGRLSRKLINGIRDKQSGKTILDFLKSDGFANRNFMQLIHDDSLTFKEDIQKAQVSGQGDSLHEHIANLAGSPAIKKGILQTVKVVDELVKVMGRHKPENIVIEMARENQTTQKGQKNSRERMKRIEEGIKELGSQILKEHPVENTQLQNEKLYLYYLQNGRDMYVDQELDINRLSDYDVDHIVPQSFLKDDSIDNKVLTRSDKNRGKSDNVPSEEVVKKMKNYWRQLLNAKLITQRKFDNLTKAERGGLSELDKAGFIKRQLVETRQITKHVAQILDSRMNTKYDENDKLIREVKVITLKSKLVSDFRKDFQFYKVREINNYHHAHDAYLNAVVGTALIKKYPKLESEFVYGDYKVYDVRKMIAKSEGSSGSETPGTSESATPESSGSEVEFSHEYWMRHALTLAKRARDEREVPVGAVLVLNNRVIGEGWNRAIGLHDPTAHAEIMALRQGGLVMQNYRLIDATLYVTFEPCVMCAGAMIHSRIGRVVFGVRNAKTGAAGSLMDVLHYPGMNHRVEITEGILADECAALLCYFFRMPRQVFNAQKKAQSSTDQEIGKATAKYFFYSNIMNFFKTEITLANGEIRKRPLIETNGETGEIVWDKGRDFATVRKVLSMPQVNIVKKTEVQTGGFSKESILPKRNSDKLIARKKDWDPKKYGGFDSPTVAYSVLVVAKVEKGKSKKLKSVKELLGITIMERSSFEKNPIDFLEAKGYKEVKKDLIIKLPKYSLFELENGRKRMLASAGELQKGNELALPSKYVNFLYLASHYEKLKGSPEDNEQKQLFVEQHKHYLDEIIEQISEFSKRVILADANLDKVLSAYNKHRDKPIREQAENIIHLFTLTNLGAPAAFKYFDTTIDRKRYTSTKEVLDATLIHQSITGLYETRIDLSQLGGD

SEQ ID NO: 271 - protein, 1540 aa, synthetic construct
  REGION 1..1540: note = 109 Cas9 TadAins 768 polypeptide sequence
MDKKYSIGLAIGTNSVGWAVITDEYKVPSKKFKVLGNTDRHSIKKNLIGALLFDSGETAEATRLKRTARRRYTRRKNRICYLQEIFSNEMAKVDDSFFHRLEESFLVEEDKKHERHPIFGNIVDEVAYHEKYPTIYHLRKKLVDSTDKADLRLIYLALAHMIKFRGHFLIEGDLNPDNSDVDKLFIQLVQTYNQLFEENPINASGVDAKAILSARLSKSRRLENLIAQLPGEKKNGLFGNLIALSLGLTPNFKSNFDLAEDAKLQLSKDTYDDDLDNLLAQIGDQYADLFLAAKNLSDAILLSDILRVNTEITKAPLSASMIKRYDEHHQDLTLLKALVRQQLPEKYKEIFFDQSKNGYAGYIDGGASQEEFYKFIKPILEKMDGTEELLVKLNREDLLRKQRTFDNGSIPHQIHLGELHAILRRQEDFYPFLKDNREKIEKILTFRIPYYVGPLARGNSRFAWMTRKSEETITPWNFEEVVDKGASAQSFIERMTNFDKNLPNEKVLPKHSLLYEYFTVYNELTKVKYVTEGMRKPAFLSGEQKKAIVDLLFKTNRKVTVKQLKEDYFKKIECFDSVEISGVEDRFNASLGTYHDLLKIIKDKDFLDNEENEDILEDIVLTLTLFEDREMIEERLKTYAHLFDDKVMKQLKRRRYTGWGRLSRKLINGIRDKQSGKTILDFLKSDGFANRNFMQLIHDDSLTFKEDIQKAQVSGQGDSLHEHIANLAGSPAIKKGILQTVKVVDELVKVMGRHKPENIVIEMARENQGSSGSETPGTSESATPESSGSEVEFSHEYWMRHALTLAKRARDEREVPVGAVLVLNNRVIGEGWNRAIGLHDPTAHAEIMALRQGGLVMQNYRLIDATLYVTFEPCVMCAGAMIHSRIGRVVFGVRNAKTGAAGSLMDVLHYPGMNHRVEITEGILADECAALLCYFFRMPRTTQKGQKNSRERMKRIEEGIKELGSQILKEHPVENTQLQNEKLYLYYLQNGRDMYVDQELDINRLSDYDVDHIVPQSFLKDDSIDNKVLTRSDKNRGKSDNVPSEEVVKKMKNYWRQLLNAKLITQRKFDNLTKAERGGLSELDKAGFIKRQLVETRQITKHVAQILDSRMNTKYDENDKLIREVKVITLKSKLVSDFRKDFQFYKVREINNYHHAHDAYLNAVVGTALIKKYPKLESEFVYGDYKVYDVRKMIAKSEQEIGKATAKYFFYSNIMNFFKTEITLANGEIRKRPLIETNGETGEIVWDKGRDFATVRKVLSMPQVNIVKKTEVQTGGFSKESILPKRNSDKLIARKKDWDPKKYGGFDSPTVAYSVLVVAKVEKGKSKKLKSVKELLGITIMERSSFEKNPIDFLEAKGYKEVKKDLIIKLPKYSLFELENGRKRMLASAGELQKGNELALPSKYVNFLYLASHYEKLKGSPEDNEQKQLFVEQHKHYLDEIIEQISEFSKRVILADANLDKVLSAYNKHRDKPIREQAENIIHLFTLTNLGAPAAFKYFDTTIDRKRYTSTKEVLDATLIHQSITGLYETRIDLSQLGGD

SEQ ID NO: 272 - protein, 1540 aa, synthetic construct
  REGION 1..1540: note = 110.1 Cas9 TadAins 1250 polypeptide sequence
MDKKYSIGLAIGTNSVGWAVITDEYKVPSKKFKVLGNTDRHSIKKNLIGALLFDSGETAEATRLKRTARRRYTRRKNRICYLQEIFSNEMAKVDDSFFHRLEESFLVEEDKKHERHPIFGNIVDEVAYHEKYPTIYHLRKKLVDSTDKADLRLIYLALAHMIKFRGHFLIEGDLNPDNSDVDKLFIQLVQTYNQLFEENPINASGVDAKAILSARLSKSRRLENLIAQLPGEKKNGLFGNLIALSLGLTPNFKSNFDLAEDAKLQLSKDTYDDDLDNLLAQIGDQYADLFLAAKNLSDAILLSDILRVNTEITKAPLSASMIKRYDEHHQDLTLLKALVRQQLPEKYKEIFFDQSKNGYAGYIDGGASQEEFYKFIKPILEKMDGTEELLVKLNREDLLRKQRTFDNGSIPHQIHLGELHAILRRQEDFYPFLKDNREKIEKILTFRIPYYVGPLARGNSRFAWMTRKSEETITPWNFEEVVDKGASAQSFIERMTNFDKNLPNEKVLPKHSLLYEYFTVYNELTKVKYVTEGMRKPAFLSGEQKKAIVDLLFKTNRKVTVKQLKEDYFKKIECFDSVEISGVEDRFNASLGTYHDLLKIIKDKDFLDNEENEDILEDIVLTLTLFEDREMIEERLKTYAHLFDDKVMKQLKRRRYTGWGRLSRKLINGIRDKQSGKTILDFLKSDGFANRNFMQLIHDDSLTFKEDIQKAQVSGQGDSLHEHIANLAGSPAIKKGILQTVKVVDELVKVMGRHKPENIVIEMARENQTTQKGQKNSRERMKRIEEGIKELGSQILKEHPVENTQLQNEKLYLYYLQNGRDMYVDQELDINRLSDYDVDHIVPQSFLKDDSIDNKVLTRSDKNRGKSDNVPSEEVVKKMKNYWRQLLNAKLITQRKFDNLTKAERGGLSELDKAGFIKRQLVETRQITKHVAQILDSRMNTKYDENDKLIREVKVITLKSKLVSDFRKDFQFYKVREINNYHHAHDAYLNAVVGTALIKKYPKLESEFVYGDYKVYDVRKMIAKSEQEIGKATAKYFFYSNIMNFFKTEITLANGEIRKRPLIETNGETGEIVWDKGRDFATVRKVLSMPQVNIVKKTEVQTGGFSKESILPKRNSDKLIARKKDWDPKKYGGFDSPTVAYSVLVVAKVEKGKSKKLKSVKELLGITIMERSSFEKNPIDFLEAKGYKEVKKDLIIKLPKYSLFELENGRKRMLASAGELQKGNELALPSKYVNFLYLASHYEKLKGSPGSSGSETPGTSESATPESSGSEVEFSHEYWMRHALTLAKRARDEREVPVGAVLVLNNRVIGEGWNRAIGLHDPTAHAEIMALRQGGLVMQNYRLIDATLYVTFEPCVMCAGAMIHSRIGRVVFGVRNAKTGAAGSLMDVLHYPGMNHRVEITEGILADECAALLCYFFRMPREDNEQKQLFVEQHKHYLDEIIEQISEFSKRVILADANLDKVLSAYNKHRDKPIREQAENIIHLFTLTNLGAPAAFKYFDTTIDRKRYTSTKEVLDATLIHQSITGLYETRIDLSQLGGD

SEQ ID NO: 273 - protein, 1543 aa, synthetic construct
  REGION 1..1543: note = 110.2 Cas9 TadAins 1250 polypeptide sequence
MDKKYSIGLAIGTNSVGWAVITDEYKVPSKKFKVLGNTDRHSIKKNLIGALLFDSGETAEATRLKRTARRRYTRRKNRICYLQEIFSNEMAKVDDSFFHRLEESFLVEEDKKHERHPIFGNIVDEVAYHEKYPTIYHLRKKLVDSTDKADLRLIYLALAHMIKFRGHFLIEGDLNPDNSDVDKLFIQLVQTYNQLFEENPINASGVDAKAILSARLSKSRRLENLIAQLPGEKKNGLFGNLIALSLGLTPNFKSNFDLAEDAKLQLSKDTYDDDLDNLLAQIGDQYADLFLAAKNLSDAILLSDILRVNTEITKAPLSASMIKRYDEHHQDLTLLKALVRQQLPEKYKEIFFDQSKNGYAGYIDGGASQEEFYKFIKPILEKMDGTEELLVKLNREDLLRKQRTFDNGSIPHQIHLGELHAILRRQEDFYPFLKDNREKIEKILTFRIPYYVGPLARGNSRFAWMTRKSEETITPWNFEEVVDKGASAQSFIERMTNFDKNLPNEKVLPKHSLLYEYFTVYNELTKVKYVTEGMRKPAFLSGEQKKAIVDLLFKTNRKVTVKQLKEDYFKKIECFDSVEISGVEDRFNASLGTYHDLLKIIKDKDFLDNEENEDILEDIVLTLTLFEDREMIEERLKTYAHLFDDKVMKQLKRRRYTGWGRLSRKLINGIRDKQSGKTILDFLKSDGFANRNFMQLIHDDSLTFKEDIQKAQVSGQGDSLHEHIANLAGSPAIKKGILQTVKVVDELVKVMGRHKPENIVIEMARENQTTQKGQKNSRERMKRIEEGIKELGSQILKEHPVENTQLQNEKLYLYYLQNGRDMYVDQELDINRLSDYDVDHIVPQSFLKDDSIDNKVLTRSDKNRGKSDNVPSEEVVKKMKNYWRQLLNAKLITQRKFDNLTKAERGGLSELDKAGFIKRQLVETRQITKHVAQILDSRMNTKYDENDKLIREVKVITLKSKLVSDFRKDFQFYKVREINNYHHAHDAYLNAVVGTALIKKYPKLESEFVYGDYKVYDVRKMIAKSEQEIGKATAKYFFYSNIMNFFKTEITLANGEIRKRPLIETNGETGEIVWDKGRDFATVRKVLSMPQVNIVKKTEVQTGGFSKESILPKRNSDKLIARKKDWDPKKYGGFDSPTVAYSVLVVAKVEKGKSKKLKSVKELLGITIMERSSFEKNPIDFLEAKGYKEVKKDLIIKLPKYSLFELENGRKRMLASAGELQKGNELALPSKYVNFLYLASHYEKLKGSPGSSGSSGSETPGTSESATPESSGSEVEFSHEYWMRHALTLAKRARDEREVPVGAVLVLNNRVIGEGWNRAIGLHDPTAHAEIMALRQGGLVMQNYRLIDATLYVTFEPCVMCAGAMIHSRIGRVVFGVRNAKTGAAGSLMDVLHYPGMNHRVEITEGILADECAALLCYFFRMPREDNEQKQLFVEQHKHYLDEIIEQISEFSKRVILADANLDKVLSAYNKHRDKPIREQAENIIHLFTLTNLGAPAAFKYFDTTIDRKRYTSTKEVLDATLIHQSITGLYETRIDLSQLGGD

SEQ ID NO: 274 - protein, 1546 aa, synthetic construct
  REGION 1..1546: note = 110.3 Cas9 TadAins 1250 polypeptide sequence
MDKKYSIGLAIGTNSVGWAVITDEYKVPSKKFKVLGNTDRHSIKKNLIGALLFDSGETAEATRLKRTARRRYTRRKNRICYLQEIFSNEMAKVDDSFFHRLEESFLVEEDKKHERHPIFGNIVDEVAYHEKYPTIYHLRKKLVDSTDKADLRLIYLALAHMIKFRGHFLIEGDLNPDNSDVDKLFIQLVQTYNQLFEENPINASGVDAKAILSARLSKSRRLENLIAQLPGEKKNGLFGNLIALSLGLTPNFKSNFDLAEDAKLQLSKDTYDDDLDNLLAQIGDQYADLFLAAKNLSDAILLSDILRVNTEITKAPLSASMIKRYDEHHQDLTLLKALVRQQLPEKYKEIFFDQSKNGYAGYIDGGASQEEFYKFIKPILEKMDGTEELLVKLNREDLLRKQRTFDNGSIPHQIHLGELHAILRRQEDFYPFLKDNREKIEKILTFRIPYYVGPLARGNSRFAWMTRKSEETITPWNFEEVVDKGASAQSFIERMTNFDKNLPNEKVLPKHSLLYEYFTVYNELTKVKYVTEGMRKPAFLSGEQKKAIVDLLFKTNRKVTVKQLKEDYFKKIECFDSVEISGVEDRFNASLGTYHDLLKIIKDKDFLDNEENEDILEDIVLTLTLFEDREMIEERLKTYAHLFDDKVMKQLKRRRYTGWGRLSRKLINGIRDKQSGKTILDFLKSDGFANRNFMQLIHDDSLTFKEDIQKAQVSGQGDSLHEHIANLAGSPAIKKGILQTVKVVDELVKVMGRHKPENIVIEMARENQTTQKGQKNSRERMKRIEEGIKELGSQILKEHPVENTQLQNEKLYLYYLQNGRDMYVDQELDINRLSDYDVDHIVPQSFLKDDSIDNKVLTRSDKNRGKSDNVPSEEVVKKMKNYWRQLLNAKLITQRKFDNLTKAERGGLSELDKAGFIKRQLVETRQITKHVAQILDSRMNTKYDENDKLIREVKVITLKSKLVSDFRKDFQFYKVREINNYHHAHDAYLNAVVGTALIKKYPKLESEFVYGDYKVYDVRKMIAKSEQEIGKATAKYFFYSNIMNFFKTEITLANGEIRKRPLIETNGETGEIVWDKGRDFATVRKVLSMPQVNIVKKTEVQTGGFSKESILPKRNSDKLIARKKDWDPKKYGGFDSPTVAYSVLVVAKVEKGKSKKLKSVKELLGITIMERSSFEKNPIDFLEAKGYKEVKKDLIIKLPKYSLFELENGRKRMLASAGELQKGNELALPSKYVNFLYLASHYEKLKGSPGSSGSSGSETPGTSESATPESGSSSGSEVEFSHEYWMRHALTLAKRARDEREVPVGAVLVLNNRVIGEGWNRAIGLHDPTAHAEIMALRQGGLVMQNYRLIDATLYVTFEPCVMCAGAMIHSRIGRVVFGVRNAKTGAAGSLMDVLHYPGMNHRVEITEGILADECAALLCYFFRMPREDNEQKQLFVEQHKHYLDEIIEQISEFSKRVILADANLDKVLSAYNKHRDKPIREQAENIIHLFTLTNLGAPAAFKYFDTTIDRKRYTSTKEVLDATLIHQSITGLYETRIDLSQLGGD

SEQ ID NO: 275 - protein, 1546 aa, synthetic construct
  REGION 1..1546: note = 110.4 Cas9 TadAins 1250 polypeptide sequence
MDKKYSIGLAIGTNSVGWAVITDEYKVPSKKFKVLGNTDRHSIKKNLIGALLFDSGETAEATRLKRTARRRYTRRKNRICYLQEIFSNEMAKVDDSFFHRLEESFLVEEDKKHERHPIFGNIVDEVAYHEKYPTIYHLRKKLVDSTDKADLRLIYLALAHMIKFRGHFLIEGDLNPDNSDVDKLFIQLVQTYNQLFEENPINASGVDAKAILSARLSKSRRLENLIAQLPGEKKNGLFGNLIALSLGLTPNFKSNFDLAEDAKLQLSKDTYDDDLDNLLAQIGDQYADLFLAAKNLSDAILLSDILRVNTEITKAPLSASMIKRYDEHHQDLTLLKALVRQQLPEKYKEIFFDQSKNGYAGYIDGGASQEEFYKFIKPILEKMDGTEELLVKLNREDLLRKQRTFDNGSIPHQIHLGELHAILRRQEDFYPFLKDNREKIEKILTFRIPYYVGPLARGNSRFAWMTRKSEETITPWNFEEVVDKGASAQSFIERMTNFDKNLPNEKVLPKHSLLYEYFTVYNELTKVKYVTEGMRKPAFLSGEQKKAIVDLLFKTNRKVTVKQLKEDYFKKIECFDSVEISGVEDRFNASLGTYHDLLKIIKDKDFLDNEENEDILEDIVLTLTLFEDREMIEERLKTYAHLFDDKVMKQLKRRRYTGWGRLSRKLINGIRDKQSGKTILDFLKSDGFANRNFMQLIHDDSLTFKEDIQKAQVSGQGDSLHEHIANLAGSPAIKKGILQTVKVVDELVKVMGRHKPENIVIEMARENQTTQKGQKNSRERMKRIEEGIKELGSQILKEHPVENTQLQNEKLYLYYLQNGRDMYVDQELDINRLSDYDVDHIVPQSFLKDDSIDNKVLTRSDKNRGKSDNVPSEEVVKKMKNYWRQLLNAKLITQRKFDNLTKAERGGLSELDKAGFIKRQLVETRQITKHVAQILDSRMNTKYDENDKLIREVKVITLKSKLVSDFRKDFQFYKVREINNYHHAHDAYLNAVVGTALIKKYPKLESEFVYGDYKVYDVRKMIAKSEQEIGKATAKYFFYSNIMNFFKTEITLANGEIRKRPLIETNGETGEIVWDKGRDFATVRKVLSMPQVNIVKKTEVQTGGFSKESILPKRNSDKLIARKKDWDPKKYGGFDSPTVAYSVLVVAKVEKGKSKKLKSVKELLGITIMERSSFEKNPIDFLEAKGYKEVKKDLIIKLPKYSLFELENGRKRMLASAGELQKGNELALPSKYVNFLYLASHYEKLKGSPGSSGSSGSETPGTSESATPESGSSSGSEVEFSHEYWMRHALTLAKRARDEREVPVGAVLVLNNRVIGEGWNRAIGLHDPTAHAEIMALRQGGLVMQNYRLIDATLYVTFEPCVMCAGAMIHSRIGRVVFGVRNAKTGAAGSLMDVLHYPGMNHRVEITEGILADECAALLCYFFRMRREDNEQKQLFVEQHKHYLDEIIEQISEFSKRVILADANLDKVLSAYNKHRDKPIREQAENIIHLFTLTNLGAPAAFKYFDTTIDRKRYTSTKEVLDATLIHQSITGLYETRIDLSQLGGD

SEQ ID NO: 276 - protein, 1546 aa, synthetic construct
  REGION 1..1546: note = 110.5 Cas9 TadAins 1249 polypeptide sequence
MDKKYSIGLAIGTNSVGWAVITDEYKVPSKKFKVLGNTDRHSIKKNLIGALLFDSGETAEATRLKRTARRRYTRRKNRICYLQEIFSNEMAKVDDSFFHRLEESFLVEEDKKHERHPIFGNIVDEVAYHEKYPTIYHLRKKLVDSTDKADLRLIYLALAHMIKFRGHFLIEGDLNPDNSDVDKLFIQLVQTYNQLFEENPINASGVDAKAILSARLSKSRRLENLIAQLPGEKKNGLFGNLIALSLGLTPNFKSNFDLAEDAKLQLSKDTYDDDLDNLLAQIGDQYADLFLAAKNLSDAILLSDILRVNTEITKAPLSASMIKRYDEHHQDLTLLKALVRQQLPEKYKEIFFDQSKNGYAGYIDGGASQEEFYKFIKPILEKMDGTEELLVKLNREDLLRKQRTFDNGSIPHQIHLGELHAILRRQEDFYPFLKDNREKIEKILTFRIPYYVGPLARGNSRFAWMTRKSEETITPWNFEEVVDKGASAQSFIERMTNFDKNLPNEKVLPKHSLLYEYFTVYNELTKVKYVTEGMRKPAFLSGEQKKAIVDLLFKTNRKVTVKQLKEDYFKKIECFDSVEISGVEDRFNASLGTYHDLLKIIKDKDFLDNEENEDILEDIVLTLTLFEDREMIEERLKTYAHLFDDKVMKQLKRRRYTGWGRLSRKLINGIRDKQSGKTILDFLKSDGFANRNFMQLIHDDSLTFKEDIQKAQVSGQGDSLHEHIANLAGSPAIKKGILQTVKVVDELVKVMGRHKPENIVIEMARENQTTQKGQKNSRERMKRIEEGIKELGSQILKEHPVENTQLQNEKLYLYYLQNGRDMYVDQELDINRLSDYDVDHIVPQSFLKDDSIDNKVLTRSDKNRGKSDNVPSEEVVKKMKNYWRQLLNAKLITQRKFDNLTKAERGGLSELDKAGFIKRQLVETRQITKHVAQILDSRMNTKYDENDKLIREVKVITLKSKLVSDFRKDFQFYKVREINNYHHAHDAYLNAVVGTALIKKYPKLESEFVYGDYKVYDVRKMIAKSEQEIGKATAKYFFYSNIMNFFKTEITLANGEIRKRPLIETNGETGEIVWDKGRDFATVRKVLSMPQVNIVKKTEVQTGGFSKESILPKRNSDKLIARKKDWDPKKYGGFDSPTVAYSVLVVAKVEKGKSKKLKSVKELLGITIMERSSFEKNPIDFLEAKGYKEVKKDLIIKLPKYSLFELENGRKRMLASAGELQKGNELALPSKYVNFLYLASHYEKLKGSGSSGSSGSETPGTSESATPESGSSSGSEVEFSHEYWMRHALTLAKRARDEREVPVGAVLVLNNRVIGEGWNRAIGLHDPTAHAEIMALRQGGLVMQNYRLIDATLYVTFEPCVMCAGAMIHSRIGRVVFGVRNAKTGAAGSLMDVLHYPGMNHRVEITEGILADECAALLCYFFRMRRPEDNEQKQLFVEQHKHYLDEIIEQISEFSKRVILADANLDKVLSAYNKHRDKPIREQAENIIHLFTLTNLGAPAAFKYFDTTIDRKRYTSTKEVLDATLIHQSITGLYETRIDLSQLGGD

SEQ ID NO: 277 - protein, 1551 aa, synthetic construct
  REGION 1..1551: note = 110.5 Cas9 TadAins delta59-66 1250 polypeptide sequence
MDKKYSIGLAIGTNSVGWAVITDEYKVPSKKFKVLGNTDRHSIKKNLIGALLFDSGETAEATRLKRTARRRYTRRKNRICYLQEIFSNEMAKVDDSFFHRLEESFLVEEDKKHERHPIFGNIVDEVAYHEKYPTIYHLRKKLVDSTDKADLRLIYLALAHMIKFRGHFLIEGDLNPDNSDVDKLFIQLVQTYNQLFEENPINASGVDAKAILSARLSKSRRLENLIAQLPGEKKNGLFGNLIALSLGLTPNFKSNFDLAEDAKLQLSKDTYDDDLDNLLAQIGDQYADLFLAAKNLSDAILLSDILRVNTEITKAPLSASMIKRYDEHHQDLTLLKALVRQQLPEKYKEIFFDQSKNGYAGYIDGGASQEEFYKFIKPILEKMDGTEELLVKLNREDLLRKQRTFDNGSIPHQIHLGELHAILRRQEDFYPFLKDNREKIEKILTFRIPYYVGPLARGNSRFAWMTRKSEETITPWNFEEVVDKGASAQSFIERMTNFDKNLPNEKVLPKHSLLYEYFTVYNELTKVKYVTEGMRKPAFLSGEQKKAIVDLLFKTNRKVTVKQLKEDYFKKIECFDSVEISGVEDRFNASLGTYHDLLKIIKDKDFLDNEENEDILEDIVLTLTLFEDREMIEERLKTYAHLFDDKVMKQLKRRRYTGWGRLSRKLINGIRDKQSGKTILDFLKSDGFANRNFMQLIHDDSLTFKEDIQKAQVSGQGDSLHEHIANLAGSPAIKKGILQTVKVVDELVKVMGRHKPENIVIEMARENQTTQKGQKNSRERMKRIEEGIKELGSQILKEHPVENTQLQNEKLYLYYLQNGRDMYVDQELDINRLSDYDVDHIVPQSFLKDDSIDNKVLTRSDKNRGKSDNVPSEEVVKKMKNYWRQLLNAKLITQRKFDNLTKAERGGLSELDKAGFIKRQLVETRQITKHVAQILDSRMNTKYDENDKLIREVKVITLKSKLVSDFRKDFQFYKVREINNYHHAHDAYLNAVVGTALIKKYPKLESEFVYGDYKVYDVRKMIAKSEQEIGKATAKYFFYSNIMNFFKTEITLANGEIRKRPLIETNGETGEIVWDKGRDFATVRKVLSMPQVNIVKKTEVQTGGFSKESILPKRNSDKLIARKKDWDPKKYGGFDSPTVAYSVLVVAKVEKGKSKKLKSVKELLGITIMERSSFEKNPIDFLEAKGYKEVKKDLIIKLPKYSLFELENGRKRMLASAGELQKGNELALPSKYVNFLYLASHYEKLKGSPGSSGSSGSETPGTSESATPESGSSGSEVEFSHEYWMRHALTLAKRARDEREVPVGAVLVLNNRVIGEGWNRAHAEIMALRQGGLVMQNYRLIDATLYVTFEPCVMCAGAMIHSRIGRVVFGVRNAKTGAAGSLMDVLHYPGMNHRVEITEGILADECAALLCYFFRMPRQVFNAQKKAQSSTDEDNEQKQLFVEQHKHYLDEIIEQISEFSKRVILADANLDKVLSAYNKHRDKPIREQAENIIHLFTLTNLGAPAAFKYFDTTIDRKRYTSTKEVLDATLIHQSITGLYETRIDLSQLGGD

SEQ ID NO: 278 - protein, 1546 aa, synthetic construct
  REGION 1..1546: note = 110.6 Cas9 TadAins 1251 polypeptide sequence
MDKKYSIGLAIGTNSVGWAVITDEYKVPSKKFKVLGNTDRHSIKKNLIGALLFDSGETAEATRLKRTARRRYTRRKNRICYLQEIFSNEMAKVDDSFFHRLEESFLVEEDKKHERHPIFGNIVDEVAYHEKYPTIYHLRKKLVDSTDKADLRLIYLALAHMIKFRGHFLIEGDLNPDNSDVDKLFIQLVQTYNQLFEENPINASGVDAKAILSARLSKSRRLENLIAQLPGEKKNGLFGNLIALSLGLTPNFKSNFDLAEDAKLQLSKDTYDDDLDNLLAQIGDQYADLFLAAKNLSDAILLSDILRVNTEITKAPLSASMIKRYDEHHQDLTLLKALVRQQLPEKYKEIFFDQSKNGYAGYIDGGASQEEFYKFIKPILEKMDGTEELLVKLNREDLLRKQRTFDNGSIPHQIHLGELHAILRRQEDFYPFLKDNREKIEKILTFRIPYYVGPLARGNSRFAWMTRKSEETITPWNFEEVVDKGASAQSFIERMTNFDKNLPNEKVLPKHSLLYEYFTVYNELTKVKYVTEGMRKPAFLSGEQKKAIVDLLFKTNRKVTVKQLKEDYFKKIECFDSVEISGVEDRFNASLGTYHDLLKIIKDKDFLDNEENEDILEDIVLTLTLFEDREMIEERLKTYAHLFDDKVMKQLKRRRYTGWGRLSRKLINGIRDKQSGKTILDFLKSDGFANRNFMQLIHDDSLTFKEDIQKAQVSGQGDSLHEHIANLAGSPAIKKGILQTVKVVDELVKVMGRHKPENIVIEMARENQTTQKGQKNSRERMKRIEEGIKELGSQILKEHPVENTQLQNEKLYLYYLQNGRDMYVDQELDINRLSDYDVDHIVPQSFLKDDSIDNKVLTRSDKNRGKSDNVPSEEVVKKMKNYWRQLLNAKLITQRKFDNLTKAERGGLSELDKAGFIKRQLVETRQITKHVAQILDSRMNTKYDENDKLIREVKVITLKSKLVSDFRKDFQFYKVREINNYHHAHDAYLNAVVGTALIKKYPKLESEFVYGDYKVYDVRKMIAKSEQEIGKATAKYFFYSNIMNFFKTEITLANGEIRKRPLIETNGETGEIVWDKGRDFATVRKVLSMPQVNIVKKTEVQTGGFSKESILPKRNSDKLIARKKDWDPKKYGGFDSPTVAYSVLVVAKVEKGKSKKLKSVKELLGITIMERSSFEKNPIDFLEAKGYKEVKKDLIIKLPKYSLFELENGRKRMLASAGELQKGNELALPSKYVNFLYLASHYEKLKGSPEGSSGSSGSETPGTSESATPESGSSSGSEVEFSHEYWMRHALTLAKRARDEREVPVGAVLVLNNRVIGEGWNRAIGLHDPTAHAEIMALRQGGLVMQNYRLIDATLYVTFEPCVMCAGAMIHSRIGRVVFGVRNAKTGAAGSLMDVLHYPGMNHRVEITEGILADECAALLCYFFRMRRDNEQKQLFVEQHKHYLDEIIEQISEFSKRVILADANLDKVLSAYNKHRDKPIREQAENIIHLFTLTNLGAPAAFKYFDTTIDRKRYTSTKEVLDATLIHQSITGLYETRIDLSQLGGD

SEQ ID NO: 279 - protein, 1546 aa, synthetic construct
  REGION 1..1546: note = 110.7 Cas9 TadAins 1252 polypeptide sequence
MDKKYSIGLAIGTNSVGWAVITDEYKVPSKKFKVLGNTDRHSIKKNLIGALLFDSGETAEATRLKRTARRRYTRRKNRICYLQEIFSNEMAKVDDSFFHRLEESFLVEEDKKHERHPIFGNIVDEVAYHEKYPTIYHLRKKLVDSTDKADLRLIYLALAHMIKFRGHFLIEGDLNPDNSDVDKLFIQLVQTYNQLFEENPINASGVDAKAILSARLSKSRRLENLIAQLPGEKKNGLFGNLIALSLGLTPNFKSNFDLAEDAKLQLSKDTYDDDLDNLLAQIGDQYADLFLAAKNLSDAILLSDILRVNTEITKAPLSASMIKRYDEHHQDLTLLKALVRQQLPEKYKEIFFDQSKNGYAGYIDGGASQEEFYKFIKPILEKMDGTEELLVKLNREDLLRKQRTFDNGSIPHQIHLGELHAILRRQEDFYPFLKDNREKIEKILTFRIPYYVGPLARGNSRFAWMTRKSEETITPWNFEEVVDKGASAQSFIERMTNFDKNLPNEKVLPKHSLLYEYFTVYNELTKVKYVTEGMRKPAFLSGEQKKAIVDLLFKTNRKVTVKQLKEDYFKKIECFDSVEISGVEDRFNASLGTYHDLLKIIKDKDFLDNEENEDILEDIVLTLTLFEDREMIEERLKTYAHLFDDKVMKQLKRRRYTGWGRLSRKLINGIRDKQSGKTILDFLKSDGFANRNFMQLIHDDSLTFKEDIQKAQVSGQGDSLHEHIANLAGSPAIKKGILQTVKVVDELVKVMGRHKPENIVIEMARENQTTQKGQKNSRERMKRIEEGIKELGSQILKEHPVENTQLQNEKLYLYYLQNGRDMYVDQELDINRLSDYDVDHIVPQSFLKDDSIDNKVLTRSDKNRGKSDNVPSEEVVKKMKNYWRQLLNAKLITQRKFDNLTKAERGGLSELDKAGFIKRQLVETRQITKHVAQILDSRMNTKYDENDKLIREVKVITLKSKLVSDFRKDFQFYKVREINNYHHAHDAYLNAVVGTALIKKYPKLESEFVYGDYKVYDVRKMIAKSEQEIGKATAKYFFYSNIMNFFKTEITLANGEIRKRPLIETNGETGEIVWDKGRDFATVRKVLSMPQVNIVKKTEVQTGGFSKESILPKRNSDKLIARKKDWDPKKYGGFDSPTVAYSVLVVAKVEKGKSKKLKSVKELLGITIMERSSFEKNPIDFLEAKGYKEVKKDLIIKLPKYSLFELENGRKRMLASAGELQKGNELALPSKYVNFLYLASHYEKLKGSPEDGSSGSSGSETPGTSESATPESGSSSGSEVEFSHEYWMRHALTLAKRARDEREVPVGAVLVLNNRVIGEGWNRAIGLHDPTAHAEIMALRQGGLVMQNYRLIDATLYVTFEPCVMCAGAMIHSRIGRVVFGVRNAKTGAAGSLMDVLHYPGMNHRVEITEGILADECAALLCYFFRMRRNEQKQLFVEQHKHYLDEIIEQISEFSKRVILADANLDKVLSAYNKHRDKPIREQAENIIHLFTLTNLGAPAAFKYFDTTIDRKRYTSTKEVLDATLIHQSITGLYETRIDLSQLGGD

SEQ ID NO: 280 - protein, 1533 aa, synthetic construct
  REGION 1..1533: note = 110.8 Cas9 TadAins delta59-66 C-truncate 1250 polypeptide sequence
MDKKYSIGLAIGTNSVGWAVITDEYKVPSKKFKVLGNTDRHSIKKNLIGALLFDSGETAEATRLKRTARRRYTRRKNRICYLQEIFSNEMAKVDDSFFHRLEESFLVEEDKKHERHPIFGNIVDEVAYHEKYPTIYHLRKKLVDSTDKADLRLIYLALAHMIKFRGHFLIEGDLNPDNSDVDKLFIQLVQTYNQLFEENPINASGVDAKAILSARLSKSRRLENLIAQLPGEKKNGLFGNLIALSLGLTPNFKSNFDLAEDAKLQLSKDTYDDDLDNLLAQIGDQYADLFLAAKNLSDAILLSDILRVNTEITKAPLSASMIKRYDEHHQDLTLLKALVRQQLPEKYKEIFFDQSKNGYAGYIDGGASQEEFYKFIKPILEKMDGTEELLVKLNREDLLRKQRTFDNGSIPHQIHLGELHAILRRQEDFYPFLKDNREKIEKILTFRIPYYVGPLARGNSRFAWMTRKSEETITPWNFEEVVDKGASAQSFIERMTNFDKNLPNEKVLPKHSLLYEYFTVYNELTKVKYVTEGMRKPAFLSGEQKKAIVDLLFKTNRKVTVKQLKEDYFKKIECFDSVEISGVEDRFNASLGTYHDLLKIIKDKDFLDNEENEDILEDIVLTLTLFEDREMIEERLKTYAHLFDDKVMKQLKRRRYTGWGRLSRKLINGIRDKQSGKTILDFLKSDGFANRNFMQLIHDDSLTFKEDIQKAQVSGQGDSLHEHIANLAGSPAIKKGILQTVKVVDELVKVMGRHKPENIVIEMARENQTTQKGQKNSRERMKRIEEGIKELGSQILKEHPVENTQLQNEKLYLYYLQNGRDMYVDQELDINRLSDYDVDHIVPQSFLKDDSIDNKVLTRSDKNRGKSDNVPSEEVVKKMKNYWRQLLNAKLITQRKFDNLTKAERGGLSELDKAGFIKRQLVETRQITKHVAQILDSRMNTKYDENDKLIREVKVITLKSKLVSDFRKDFQFYKVREINNYHHAHDAYLNAVVGTALIKKYPKLESEFVYGDYKVYDVRKMIAKSEQEIGKATAKYFFYSNIMNFFKTEITLANGEIRKRPLIETNGETGEIVWDKGRDFATVRKVLSMPQVNIVKKTEVQTGGFSKESILPKRNSDKLIARKKDWDPKKYGGFDSPTVAYSVLVVAKVEKGKSKKLKSVKELLGITIMERSSFEKNPIDFLEAKGYKEVKKDLIIKLPKYSLFELENGRKRMLASAGELQKGNELALPSKYVNFLYLASHYEKLKGSPGSSGSETPGTSESATPESSGSEVEFSHEYWMRHALTLAKRARDEREVPVGAVLVLNNRVIGEGWNRAHAEIMALRQGGLVMQNYRLIDATLYVTFEPCVMCAGAMIHSRIGRVVFGVRNAKTGAAGSLMDVLHYPGMNHRVEITEGILADECAALLCYFFRMPRQEDNEQKQLFVEQHKHYLDEIIEQISEFSKRVILADANLDKVLSAYNKHRDKPIREQAENIIHLFTLTNLGAPAAFKYFDTTIDRKRYTSTKEVLDATLIHQSITGLYETRIDLSQLGGD

SEQ ID NO: 281 - protein, 1549 aa, synthetic construct
  REGION 1..1549: note = 111.1 Cas9 TadAins 997 polypeptide sequence
MDKKYSIGLAIGTNSVGWAVITDEYKVPSKKFKVLGNTDRHSIKKNLIGALLFDSGETAEATRLKRTARRRYTRRKNRICYLQEIFSNEMAKVDDSFFHRLEESFLVEEDKKHERHPIFGNIVDEVAYHEKYPTIYHLRKKLVDSTDKADLRLIYLALAHMIKFRGHFLIEGDLNPDNSDVDKLFIQLVQTYNQLFEENPINASGVDAKAILSARLSKSRRLENLIAQLPGEKKNGLFGNLIALSLGLTPNFKSNFDLAEDAKLQLSKDTYDDDLDNLLAQIGDQYADLFLAAKNLSDAILLSDILRVNTEITKAPLSASMIKRYDEHHQDLTLLKALVRQQLPEKYKEIFFDQSKNGYAGYIDGGASQEEFYKFIKPILEKMDGTEELLVKLNREDLLRKQRTFDNGSIPHQIHLGELHAILRRQEDFYPFLKDNREKIEKILTFRIPYYVGPLARGNSRFAWMTRKSEETITPWNFEEVVDKGASAQSFIERMTNFDKNLPNEKVLPKHSLLYEYFTVYNELTKVKYVTEGMRKPAFLSGEQKKAIVDLLFKTNRKVTVKQLKEDYFKKIECFDSVEISGVEDRFNASLGTYHDLLKIIKDKDFLDNEENEDILEDIVLTLTLFEDREMIEERLKTYAHLFDDKVMKQLKRRRYTGWGRLSRKLINGIRDKQSGKTILDFLKSDGFANRNFMQLIHDDSLTFKEDIQKAQVSGQGDSLHEHIANLAGSPAIKKGILQTVKVVDELVKVMGRHKPENIVIEMARENQTTQKGQKNSRERMKRIEEGIKELGSQILKEHPVENTQLQNEKLYLYYLQNGRDMYVDQELDINRLSDYDVDHIVPQSFLKDDSIDNKVLTRSDKNRGKSDNVPSEEVVKKMKNYWRQLLNAKLITQRKFDNLTKAERGGLSELDKAGFIKRQLVETRQITKHVAQILDSRMNTKYDENDKLIREVKVITLKSKLVSDFRKDFQFYKVREINNYHHAHDAYLNAVVGTALSHEYWMRHALTLAKRARDEREVPVGAVLVLNNRVIGEGWNRAIGLHDPTAHAEIMALRQGGLVMQNYRLIDATLYVTFEPCVMCAGAMIHSRIGRVVFGVRNAKTGAAGSLMDVLHYPGMNHRVEITEGILADECAALLCYFFRMPRQVFNAQKKAQSSTDGSSGSETPGTSESATPESSGIKKYPKLESEFVYGDYKVYDVRKMIAKSEQEIGKATAKYFFYSNIMNFFKTEITLANGEIRKRPLIETNGETGEIVWDKGRDFATVRKVLSMPQVNIVKKTEVQTGGFSKESILPKRNSDKLIARKKDWDPKKYGGFDSPTVAYSVLVVAKVEKGKSKKLKSVKELLGITIMERSSFEKNPIDFLEAKGYKEVKKDLIIKLPKYSLFELENGRKRMLASAGELQKGNELALPSKYVNFLYLASHYEKLKGSPEDNEQKQLFVEQHKHYLDEIIEQISEFSKRVILADANLDKVLSAYNKHRDKPIREQAENIIHLFTLTNLGAPAAFKYFDTTIDRKRYTSTKEVLDATLIHQSITGLYETRIDLSQLGGD

SEQ ID NO: 282 - protein, 1555 aa, synthetic construct
  REGION 1..1555: note = 111.2 Cas9 TadAins 997 polypeptide sequence
MDKKYSIGLAIGTNSVGWAVITDEYKVPSKKFKVLGNTDRHSIKKNLIGALLFDSGETAEATRLKRTARRRYTRRKNRICYLQEIFSNEMAKVDDSFFHRLEESFLVEEDKKHERHPIFGNIVDEVAYHEKYPTIYHLRKKLVDSTDKADLRLIYLALAHMIKFRGHFLIEGDLNPDNSDVDKLFIQLVQTYNQLFEENPINASGVDAKAILSARLSKSRRLENLIAQLPGEKKNGLFGNLIALSLGLTPNFKSNFDLAEDAKLQLSKDTYDDDLDNLLAQIGDQYADLFLAAKNLSDAILLSDILRVNTEITKAPLSASMIKRYDEHHQDLTLLKALVRQQLPEKYKEIFFDQSKNGYAGYIDGGASQEEFYKFIKPILEKMDGTEELLVKLNREDLLRKQRTFDNGSIPHQIHLGELHAILRRQEDFYPFLKDNREKIEKILTFRIPYYVGPLARGNSRFAWMTRKSEETITPWNFEEVVDKGASAQSFIERMTNFDKNLPNEKVLPKHSLLYEYFTVYNELTKVKYVTEGMRKPAFLSGEQKKAIVDLLFKTNRKVTVKQLKEDYFKKIECFDSVEISGVEDRFNASLGTYHDLLKIIKDKDFLDNEENEDILEDIVLTLTLFEDREMIEERLKTYAHLFDDKVMKQLKRRRYTGWGRLSRKLINGIRDKQSGKTILDFLKSDGFANRNFMQLIHDDSLTFKEDIQKAQVSGQGDSLHEHIANLAGSPAIKKGILQTVKVVDELVKVMGRHKPENIVIEMARENQTTQKGQKNSRERMKRIEEGIKELGSQILKEHPVENTQLQNEKLYLYYLQNGRDMYVDQELDINRLSDYDVDHIVPQSFLKDDSIDNKVLTRSDKNRGKSDNVPSEEVVKKMKNYWRQLLNAKLITQRKFDNLTKAERGGLSELDKAGFIKRQLVETRQITKHVAQILDSRMNTKYDENDKLIREVKVITLKSKLVSDFRKDFQFYKVREINNYHHAHDAYLNAVVGTALSHEYWMRHALTLAKRARDEREVPVGAVLVLNNRVIGEGWNRAIGLHDPTAHAEIMALRQGGLVMQNYRLIDATLYVTFEPCVMCAGAMIHSRIGRVVFGVRNAKTGAAGSLMDVLHYPGMNHRVEITEGILADECAALLCYFFRMPRQVFNAQKKAQSSTDGSSGSSGSETPGTSESATPESSGGSSIKKYPKLESEFVYGDYKVYDVRKMIAKSEQEIGKATAKYFFYSNIMNFFKTEITLANGEIRKRPLIETNGETGEIVWDKGRDFATVRKVLSMPQVNIVKKTEVQTGGFSKESILPKRNSDKLIARKKDWDPKKYGGFDSPTVAYSVLVVAKVEKGKSKKLKSVKELLGITIMERSSFEKNPIDFLEAKGYKEVKKDLIIKLPKYSLFELENGRKRMLASAGELQKGNELALPSKYVNFLYLASHYEKLKGSPEDNEQKQLFVEQHKHYLDEIIEQISEFSKRVILADANLDKVLSAYNKHRDKPIREQAENIIHLFTLTNLGAPAAFKYFDTTIDRKRYTSTKEVLDATLIHQSITGLYETRIDLSQLGGD

SEQ ID NO: 283 - protein, 1421 aa, synthetic construct
  REGION 1..1421: note = 112 delta HNH TadA polypeptide sequence
MDKKYSIGLAIGTNSVGWAVITDEYKVPSKKFKVLGNTDRHSIKKNLIGALLFDSGETAEATRLKRTARRRYTRRKNRICYLQEIFSNEMAKVDDSFFHRLEESFLVEEDKKHERHPIFGNIVDEVAYHEKYPTIYHLRKKLVDSTDKADLRLIYLALAHMIKFRGHFLIEGDLNPDNSDVDKLFIQLVQTYNQLFEENPINASGVDAKAILSARLSKSRRLENLIAQLPGEKKNGLFGNLIALSLGLTPNFKSNFDLAEDAKLQLSKDTYDDDLDNLLAQIGDQYADLFLAAKNLSDAILLSDILRVNTEITKAPLSASMIKRYDEHHQDLTLLKALVRQQLPEKYKEIFFDQSKNGYAGYIDGGASQEEFYKFIKPILEKMDGTEELLVKLNREDLLRKQRTFDNGSIPHQIHLGELHAILRRQEDFYPFLKDNREKIEKILTFRIPYYVGPLARGNSRFAWMTRKSEETITPWNFEEVVDKGASAQSFIERMTNFDKNLPNEKVLPKHSLLYEYFTVYNELTKVKYVTEGMRKPAFLSGEQKKAIVDLLFKTNRKVTVKQLKEDYFKKIECFDSVEISGVEDRFNASLGTYHDLLKIIKDKDFLDNEENEDILEDIVLTLTLFEDREMIEERLKTYAHLFDDKVMKQLKRRRYTGWGRLSRKLINGIRDKQSGKTILDFLKSDGFANRNFMQLIHDDSLTFKEDIQKAQVSGQGDSLHEHIANLAGSPAIKKGILQTVKVVDELVKVMGRHKPENIVIEMARENQTTQKGQKNSRERMKRIEEGIKELGSEVEFSHEYWMRHALTLAKRARDEREVPVGAVLVLNNRVIGEGWNRAIGLHDPTAHAEIMALRQGGLVMQNYRLIDATLYVTFEPCVMCAGAMIHSRIGRVVFGVRNAKTGAAGSLMDVLHYPGMNHRVEITEGILADECAALLCYFFRMPRQVFNAQKKAQSSTDGGLSELDKAGFIKRQLVETRQITKHVAQILDSRMNTKYDENDKLIREVKVITLKSKLVSDFRKDFQFYKVREINNYHHAHDAYLNAVVGTALIKKYPKLESEFVYGDYKVYDVRKMIAKSEQEIGKATAKYFFYSNIMNFFKTEITLANGEIRKRPLIETNGETGEIVWDKGRDFATVRKVLSMPQVNIVKKTEVQTGGFSKESILPKRNSDKLIARKKDWDPKKYGGFDSPTVAYSVLVVAKVEKGKSKKLKSVKELLGITIMERSSFEKNPIDFLEAKGYKEVKKDLIIKLPKYSLFELENGRKRMLASAGELQKGNELALPSKYVNFLYLASHYEKLKGSPEDNEQKQLFVEQHKHYLDEIIEQISEFSKRVILADANLDKVLSAYNKHRDKPIREQAENIIHLFTLTNLGAPAAFKYFDTTIDRKRYTSTKEVLDATLIHQSITGLYETRIDLSQLGGD

SEQ ID NO: 284 - protein, 1552 aa, synthetic construct
  REGION 1..1552: note = 113 N-term single TadA helixtrunc 165-end polypeptide sequence
MSEVEFSHEYWMRHALTLAKRARDEREVPVGAVLVLNNRVIGEGWNRAIGLHDPTAHAEIMALRQGGLVMQNYRLIDATLYVTFEPCVMCAGAMIHSRIGRVVFGVRNAKTGAAGSLMDVLHYPGMNHRVEITEGILADECAALLCYFFRMPRSGGSSGGSSGSETPGTSESATPESSGGSSGGSDKKYSIGLAIGTNSVGWAVITDEYKVPSKKFKVLGNTDRHSIKKNLIGALLFDSGETAEATRLKRTARRRYTRRKNRICYLQEIFSNEMAKVDDSFFHRLEESFLVEEDKKHERHPIFGNIVDEVAYHEKYPTIYHLRKKLVDSTDKADLRLIYLALAHMIKFRGHFLIEGDLNPDNSDVDKLFIQLVQTYNQLFEENPINASGVDAKAILSARLSKSRRLENLIAQLPGEKKNGLFGNLIALSLGLTPNFKSNFDLAEDAKLQLSKDTYDDDLDNLLAQIGDQYADLFLAAKNLSDAILLSDILRVNTEITKAPLSASMIKRYDEHHQDLTLLKALVRQQLPEKYKEIFFDQSKNGYAGYIDGGASQEEFYKFIKPILEKMDGTEELLVKLNREDLLRKQRTFDNGSIPHQIHLGELHAILRRQEDFYPFLKDNREKIEKILTFRIPYYVGPLARGNSRFAWMTRKSEETITPWNFEEVVDKGASAQSFIERMTNFDKNLPNEKVLPKHSLLYEYFTVYNELTKVKYVTEGMRKPAFLSGEQKKAIVDLLFKTNRKVTVKQLKEDYFKKIECFDSVEISGVEDRFNASLGTYHDLLKIIKDKDFLDNEENEDILEDIVLTLTLFEDREMIEERLKTYAHLFDDKVMKQLKRRRYTGWGRLSRKLINGIRDKQSGKTILDFLKSDGFANRNFMQLIHDDSLTFKEDIQKAQVSGQGDSLHEHIANLAGSPAIKKGILQTVKVVDELVKVMGRHKPENIVIEMARENQTTQKGQKNSRERMKRIEEGIKELGSQILKEHPVENTQLQNEKLYLYYLQNGRDMYVDQELDINRLSDYDVDHIVPQSFLKDDSIDNKVLTRSDKNRGKSDNVPSEEVVKKMKNYWRQLLNAKLITQRKFDNLTKAERGGLSELDKAGFIKRQLVETRQITKHVAQILDSRMNTKYDENDKLIREVKVITLKSKLVSDFRKDFQFYKVREINNYHHAHDAYLNAVVGTALIKKYPKLESEFVYGDYKVYDVRKMIAKSEQEIGKATAKYFFYSNIMNFFKTEITLANGEIRKRPLIETNGETGEIVWDKGRDFATVRKVLSMPQVNIVKKTEVQTGGFSKESILPKRNSDKLIARKKDWDPKKYGGFDSPTVAYSVLVVAKVEKGKSKKLKSVKELLGITIMERSSFEKNPIDFLEAKGYKEVKKDLIIKLPKYSLFELENGRKRMLASAGELQKGNELALPSKYVNFLYLASHYEKLKGSPEDNEQKQLFVEQHKHYLDEIIEQISEFSKRVILADANLDKVLSAYNKHRDKPIREQAENIIHLFTLTNLGAPAAFKYFDTTIDRKRYTSTKEVLDATLIHQSITGLYETRIDLSQLGGD

SEQ ID NO: 285 - protein, 1545 aa, synthetic construct
  REGION 1..1545: note = 114 N-term single TadA helixtrunc 165-end delta 59-65 polypeptide sequence
MSEVEFSHEYWMRHALTLAKRARDEREVPVGAVLVLNNRVIGEGWNRTAHAEIMALRQGGLVMQNYRLIDATLYVTFEPCVMCAGAMIHSRIGRVVFGVRNAKTGAAGSLMDVLHYPGMNHRVEITEGILADECAALLCYFFRMPRSGGSSGGSSGSETPGTSESATPESSGGSSGGSDKKYSIGLAIGTNSVGWAVITDEYKVPSKKFKVLGNTDRHSIKKNLIGALLFDSGETAEATRLKRTARRRYTRRKNRICYLQEIFSNEMAKVDDSFFHRLEESFLVEEDKKHERHPIFGNIVDEVAYHEKYPTIYHLRKKLVDSTDKADLRLIYLALAHMIKFRGHFLIEGDLNPDNSDVDKLFIQLVQTYNQLFEENPINASGVDAKAILSARLSKSRRLENLIAQLPGEKKNGLFGNLIALSLGLTPNFKSNFDLAEDAKLQLSKDTYDDDLDNLLAQIGDQYADLFLAAKNLSDAILLSDILRVNTEITKAPLSASMIKRYDEHHQDLTLLKALVRQQLPEKYKEIFFDQSKNGYAGYIDGGASQEEFYKFIKPILEKMDGTEELLVKLNREDLLRKQRTFDNGSIPHQIHLGELHAILRRQEDFYPFLKDNREKIEKILTFRIPYYVGPLARGNSRFAWMTRKSEETITPWNFEEVVDKGASAQSFIERMTNFDKNLPNEKVLPKHSLLYEYFTVYNELTKVKYVTEGMRKPAFLSGEQKKAIVDLLFKTNRKVTVKQLKEDYFKKIECFDSVEISGVEDRFNASLGTYHDLLKIIKDKDFLDNEENEDILEDIVLTLTLFEDREMIEERLKTYAHLFDDKVMKQLKRRRYTGWGRLSRKLINGIRDKQSGKTILDFLKSDGFANRNFMQLIHDDSLTFKEDIQKAQVSGQGDSLHEHIANLAGSPAIKKGILQTVKVVDELVKVMGRHKPENIVIEMARENQTTQKGQKNSRERMKRIEEGIKELGSQILKEHPVENTQLQNEKLYLYYLQNGRDMYVDQELDINRLSDYDVDHIVPQSFLKDDSIDNKVLTRSDKNRGKSDNVPSEEVVKKMKNYWRQLLNAKLITQRKFDNLTKAERGGLSELDKAGFIKRQLVETRQITKHVAQILDSRMNTKYDENDKLIREVKVITLKSKLVSDFRKDFQFYKVREINNYHHAHDAYLNAVVGTALIKKYPKLESEFVYGDYKVYDVRKMIAKSEQEIGKATAKYFFYSNIMNFFKTEITLANGEIRKRPLIETNGETGEIVWDKGRDFATVRKVLSMPQVNIVKKTEVQTGGFSKESILPKRNSDKLIARKKDWDPKKYGGFDSPTVAYSVLVVAKVEKGKSKKLKSVKELLGITIMERSSFEKNPIDFLEAKGYKEVKKDLIIKLPKYSLFELENGRKRMLASAGELQKGNELALPSKYVNFLYLASHYEKLKGSPEDNEQKQLFVEQHKHYLDEIIEQISEFSKRVILADANLDKVLSAYNKHRDKPIREQAENIIHLFTLTNLGAPAAFKYFDTTIDRKRYTSTKEVLDATLIHQSITGLYETRIDLSQLGGD

SEQ ID NO: 286 - protein, 1541 aa, synthetic construct
  REGION 1..1541: note = 115.1 Cas9 TadAins 1004 polypeptide sequence
MDKKYSIGLAIGTNSVGWAVITDEYKVPSKKFKVLGNTDRHSIKKNLIGALLFDSGETAEATRLKRTARRRYTRRKNRICYLQEIFSNEMAKVDDSFFHRLEESFLVEEDKKHERHPIFGNIVDEVAYHEKYPTIYHLRKKLVDSTDKADLRLIYLALAHMIKFRGHFLIEGDLNPDNSDVDKLFIQLVQTYNQLFEENPINASGVDAKAILSARLSKSRRLENLIAQLPGEKKNGLFGNLIALSLGLTPNFKSNFDLAEDAKLQLSKDTYDDDLDNLLAQIGDQYADLFLAAKNLSDAILLSDILRVNTEITKAPLSASMIKRYDEHHQDLTLLKALVRQQLPEKYKEIFFDQSKNGYAGYIDGGASQEEFYKFIKPILEKMDGTEELLVKLNREDLLRKQRTFDNGSIPHQIHLGELHAILRRQEDFYPFLKDNREKIEKILTFRIPYYVGPLARGNSRFAWMTRKSEETITPWNFEEVVDKGASAQSFIERMTNFDKNLPNEKVLPKHSLLYEYFTVYNELTKVKYVTEGMRKPAFLSGEQKKAIVDLLFKTNRKVTVKQLKEDYFKKIECFDSVEISGVEDRFNASLGTYHDLLKIIKDKDFLDNEENEDILEDIVLTLTLFEDREMIEERLKTYAHLFDDKVMKQLKRRRYTGWGRLSRKLINGIRDKQSGKTILDFLKSDGFANRNFMQLIHDDSLTFKEDIQKAQVSGQGDSLHEHIANLAGSPAIKKGILQTVKVVDELVKVMGRHKPENIVIEMARENQTTQKGQKNSRERMKRIEEGIKELGSQILKEHPVENTQLQNEKLYLYYLQNGRDMYVDQELDINRLSDYDVDHIVPQSFLKDDSIDNKVLTRSDKNRGKSDNVPSEEVVKKMKNYWRQLLNAKLITQRKFDNLTKAERGGLSELDKAGFIKRQLVETRQITKHVAQILDSRMNTKYDENDKLIREVKVITLKSKLVSDFRKDFQFYKVREINNYHHAHDAYLNAVVGTALIKKYPKGSSGSETPGTSESATPESSGSEVEFSHEYWMRHALTLAKRARDEREVPVGAVLVLNNRVIGEGWNRAIGLHDPTAHAEIMALRQGGLVMQNYRLIDATLYVTFEPCVMCAGAMIHSRIGRVVFGVRNAKTGAAGSLMDVLHYPGMNHRVEITEGILADECAALLCYFFRMPRQLESEFVYGDYKVYDVRKMIAKSEQEIGKATAKYFFYSNIMNFFKTEITLANGEIRKRPLIETNGETGEIVWDKGRDFATVRKVLSMPQVNIVKKTEVQTGGFSKESILPKRNSDKLIARKKDWDPKKYGGFDSPTVAYSVLVVAKVEKGKSKKLKSVKELLGITIMERSSFEKNPIDFLEAKGYKEVKKDLIIKLPKYSLFELENGRKRMLASAGELQKGNELALPSKYVNFLYLASHYEKLKGSPEDNEQKQLFVEQHKHYLDEIIEQISEFSKRVILADANLDKVLSAYNKHRDKPIREQAENIIHLFTLTNLGAPAAFKYFDTTIDRKRYTSTKEVLDATLIHQSITGLYETRIDLSQLGGD

SEQ ID NO: 287 - protein, 1541 aa, synthetic construct
  REGION 1..1541: note = 115.2 Cas9 TadAins 1005 polypeptide sequence
MDKKYSIGLAIGTNSVGWAVITDEYKVPSKKFKVLGNTDRHSIKKNLIGALLFDSGETAEATRLKRTARRRYTRRKNRICYLQEIFSNEMAKVDDSFFHRLEESFLVEEDKKHERHPIFGNIVDEVAYHEKYPTIYHLRKKLVDSTDKADLRLIYLALAHMIKFRGHFLIEGDLNPDNSDVDKLFIQLVQTYNQLFEENPINASGVDAKAILSARLSKSRRLENLIAQLPGEKKNGLFGNLIALSLGLTPNFKSNFDLAEDAKLQLSKDTYDDDLDNLLAQIGDQYADLFLAAKNLSDAILLSDILRVNTEITKAPLSASMIKRYDEHHQDLTLLKALVRQQLPEKYKEIFFDQSKNGYAGYIDGGASQEEFYKFIKPILEKMDGTEELLVKLNREDLLRKQRTFDNGSIPHQIHLGELHAILRRQEDFYPFLKDNREKIEKILTFRIPYYVGPLARGNSRFAWMTRKSEETITPWNFEEVVDKGASAQSFIERMTNFDKNLPNEKVLPKHSLLYEYFTVYNELTKVKYVTEGMRKPAFLSGEQKKAIVDLLFKTNRKVTVKQLKEDYFKKIECFDSVEISGVEDRFNASLGTYHDLLKIIKDKDFLDNEENEDILEDIVLTLTLFEDREMIEERLKTYAHLFDDKVMKQLKRRRYTGWGRLSRKLINGIRDKQSGKTILDFLKSDGFANRNFMQLIHDDSLTFKEDIQKAQVSGQGDSLHEHIANLAGSPAIKKGILQTVKVVDELVKVMGRHKPENIVIEMARENQTTQKGQKNSRERMKRIEEGIKELGSQILKEHPVENTQLQNEKLYLYYLQNGRDMYVDQELDINRLSDYDVDHIVPQSFLKDDSIDNKVLTRSDKNRGKSDNVPSEEVVKKMKNYWRQLLNAKLITQRKFDNLTKAERGGLSELDKAGFIKRQLVETRQITKHVAQILDSRMNTKYDENDKLIREVKVITLKSKLVSDFRKDFQFYKVREINNYHHAHDAYLNAVVGTALIKKYPKLGSSGSETPGTSESATPESSGSEVEFSHEYWMRHALTLAKRARDEREVPVGAVLVLNNRVIGEGWNRAIGLHDPTAHAEIMALRQGGLVMQNYRLIDATLYVTFEPCVMCAGAMIHSRIGRVVFGVRNAKTGAAGSLMDVLHYPGMNHRVEITEGILADECAALLCYFFRMPRQESEFVYGDYKVYDVRKMIAKSEQEIGKATAKYFFYSNIMNFFKTEITLANGEIRKRPLIETNGETGEIVWDKGRDFATVRKVLSMPQVNIVKKTEVQTGGFSKESILPKRNSDKLIARKKDWDPKKYGGFDSPTVAYSVLVVAKVEKGKSKKLKSVKELLGITIMERSSFEKNPIDFLEAKGYKEVKKDLIIKLPKYSLFELENGRKRMLASAGELQKGNELALPSKYVNFLYLASHYEKLKGSPEDNEQKQLFVEQHKHYLDEIIEQISEFSKRVILADANLDKVLSAYNKHRDKPIREQAENIIHLFTLTNLGAPAAFKYFDTTIDRKRYTSTKEVLDATLIHQSITGLYETRIDLSQLGGD

SEQ ID NO: 288 - protein, 1541 aa, synthetic construct
  REGION 1..1541: note = 115.3 Cas9 TadAins 1006 polypeptide sequence
MDKKYSIGLAIGTNSVGWAVITDEYKVPSKKFKVLGNTDRHSIKKNLIGALLFDSGETAEATRLKRTARRRYTRRKNRICYLQEIFSNEMAKVDDSFFHRLEESFLVEEDKKHERHPIFGNIVDEVAYHEKYPTIYHLRKKLVDSTDKADLRLIYLALAHMIKFRGHFLIEGDLNPDNSDVDKLFIQLVQTYNQLFEENPINASGVDAKAILSARLSKSRRLENLIAQLPGEKKNGLFGNLIALSLGLTPNFKSNFDLAEDAKLQLSKDTYDDDLDNLLAQIGDQYADLFLAAKNLSDAILLSDILRVNTEITKAPLSASMIKRYDEHHQDLTLLKALVRQQLPEKYKEIFFDQSKNGYAGYIDGGASQEEFYKFIKPILEKMDGTEELLVKLNREDLLRKQRTFDNGSIPHQIHLGELHAILRRQEDFYPFLKDNREKIEKILTFRIPYYVGPLARGNSRFAWMTRKSEETITPWNFEEVVDKGASAQSFIERMTNFDKNLPNEKVLPKHSLLYEYFTVYNELTKVKYVTEGMRKPAFLSGEQKKAIVDLLFKTNRKVTVKQLKEDYFKKIECFDSVEISGVEDRFNASLGTYHDLLKIIKDKDFLDNEENEDILEDIVLTLTLFEDREMIEERLKTYAHLFDDKVMKQLKRRRYTGWGRLSRKLINGIRDKQSGKTILDFLKSDGFANRNFMQLIHDDSLTFKEDIQKAQVSGQGDSLHEHIANLAGSPAIKKGILQTVKVVDELVKVMGRHKPENIVIEMARENQTTQKGQKNSRERMKRIEEGIKELGSQILKEHPVENTQLQNEKLYLYYLQNGRDMYVDQELDINRLSDYDVDHIVPQSFLKDDSIDNKVLTRSDKNRGKSDNVPSEEVVKKMKNYWRQLLNAKLITQRKFDNLTKAERGGLSELDKAGFIKRQLVETRQITKHVAQILDSRMNTKYDENDKLIREVKVITLKSKLVSDFRKDFQFYKVREINNYHHAHDAYLNAVVGTALIKKYPKLEGSSGSETPGTSESATPESSGSEVEFSHEYWMRHALTLAKRARDEREVPVGAVLVLNNRVIGEGWNRAIGLHDPTAHAEIMALRQGGLVMQNYRLIDATLYVTFEPCVMCAGAMIHSRIGRVVFGVRNAKTGAAGSLMDVLHYPGMNHRVEITEGILADECAALLCYFFRMPRQSEFVYGDYKVYDVRKMIAKSEQEIGKATAKYFFYSNIMNFFKTEITLANGEIRKRPLIETNGETGEIVWDKGRDFATVRKVLSMPQVNIVKKTEVQTGGFSKESILPKRNSDKLIARKKDWDPKKYGGFDSPTVAYSVLVVAKVEKGKSKKLKSVKELLGITIMERSSFEKNPIDFLEAKGYKEVKKDLIIKLPKYSLFELENGRKRMLASAGELQKGNELALPSKYVNFLYLASHYEKLKGSPEDNEQKQLFVEQHKHYLDEIIEQISEFSKRVILADANLDKVLSAYNKHRDKPIREQAENIIHLFTLTNLGAPAAFKYFDTTIDRKRYTSTKEVLDATLIHQSITGLYETRIDLSQLGGD

SEQ ID NO: 289 - protein, 1541 aa, synthetic construct
  REGION 1..1541: note = 115.4 Cas9 TadAins 1007 polypeptide sequence
MDKKYSIGLAIGTNSVGWAVITDEYKVPSKKFKVLGNTDRHSIKKNLIGALLFDSGETAEATRLKRTARRRYTRRKNRICYLQEIFSNEMAKVDDSFFHRLEESFLVEEDKKHERHPIFGNIVDEVAYHEKYPTIYHLRKKLVDSTDKADLRLIYLALAHMIKFRGHFLIEGDLNPDNSDVDKLFIQLVQTYNQLFEENPINASGVDAKAILSARLSKSRRLENLIAQLPGEKKNGLFGNLIALSLGLTPNFKSNFDLAEDAKLQLSKDTYDDDLDNLLAQIGDQYADLFLAAKNLSDAILLSDILRVNTEITKAPLSASMIKRYDEHHQDLTLLKALVRQQLPEKYKEIFFDQSKNGYAGYIDGGASQEEFYKFIKPILEKMDGTEELLVKLNREDLLRKQRTFDNGSIPHQIHLGELHAILRRQEDFYPFLKDNREKIEKILTFRIPYYVGPLARGNSRFAWMTRKSEETITPWNFEEVVDKGASAQSFIERMTNFDKNLPNEKVLPKHSLLYEYFTVYNELTKVKYVTEGMRKPAFLSGEQKKAIVDLLFKTNRKVTVKQLKEDYFKKIECFDSVEISGVEDRFNASLGTYHDLLKIIKDKDFLDNEENEDILEDIVLTLTLFEDREMIEERLKTYAHLFDDKVMKQLKRRRYTGWGRLSRKLINGIRDKQSGKTILDFLKSDGFANRNFMQLIHDDSLTFKEDIQKAQVSGQGDSLHEHIANLAGSPAIKKGILQTVKVVDELVKVMGRHKPENIVIEMARENQTTQKGQKNSRERMKRIEEGIKELGSQILKEHPVENTQLQNEKLYLYYLQNGRDMYVDQELDINRLSDYDVDHIVPQSFLKDDSIDNKVLTRSDKNRGKSDNVPSEEVVKKMKNYWRQLLNAKLITQRKFDNLTKAERGGLSELDKAGFIKRQLVETRQITKHVAQILDSRMNTKYDENDKLIREVKVITLKSKLVSDFRKDFQFYKVREINNYHHAHDAYLNAVVGTALIKKYPKLESGSSGSETPGTSESATPESSGSEVEFSHEYWMRHALTLAKRARDEREVPVGAVLVLNNRVIGEGWNRAIGLHDPTAHAEIMALRQGGLVMQNYRLIDATLYVTFEPCVMCAGAMIHSRIGRVVFGVRNAKTGAAGSLMDVLHYPGMNHRVEITEGILADECAALLCYFFRMPRQEFVYGDYKVYDVRKMIAKSEQEIGKATAKYFFYSNIMNFFKTEITLANGEIRKRPLIETNGETGEIVWDKGRDFATVRKVLSMPQVNIVKKTEVQTGGFSKESILPKRNSDKLIARKKDWDPKKYGGFDSPTVAYSVLVVAKVEKGKSKKLKSVKELLGITIMERSSFEKNPIDFLEAKGYKEVKKDLIIKLPKYSLFELENGRKRMLASAGELQKGNELALPSKYVNFLYLASHYEKLKGSPEDNEQKQLFVEQHKHYLDEIIEQISEFSKRVILADANLDKVLSAYNKHRDKPIREQAENIIHLFTLTNLGAPAAFKYFDTTIDRKRYTSTKEVLDATLIHQSITGLYETRIDLSQLGGD

SEQ ID NO: 290 - protein, 1541 aa, synthetic construct
  REGION 1..1541: note = 116.1 Cas9 TadAins C-term truncate 792 polypeptide sequence
MDKKYSIGLAIGTNSVGWAVITDEYKVPSKKFKVLGNTDRHSIKKNLIGALLFDSGETAEATRLKRTARRRYTRRKNRICYLQEIFSNEMAKVDDSFFHRLEESFLVEEDKKHERHPIFGNIVDEVAYHEKYPTIYHLRKKLVDSTDKADLRLIYLALAHMIKFRGHFLIEGDLNPDNSDVDKLFIQLVQTYNQLFEENPINASGVDAKAILSARLSKSRRLENLIAQLPGEKKNGLFGNLIALSLGLTPNFKSNFDLAEDAKLQLSKDTYDDDLDNLLAQIGDQYADLFLAAKNLSDAILLSDILRVNTEITKAPLSASMIKRYDEHHQDLTLLKALVRQQLPEKYKEIFFDQSKNGYAGYIDGGASQEEFYKFIKPILEKMDGTEELLVKLNREDLLRKQRTFDNGSIPHQIHLGELHAILRRQEDFYPFLKDNREKIEKILTFRIPYYVGPLARGNSRFAWMTRKSEETITPWNFEEVVDKGASAQSFIERMTNFDKNLPNEKVLPKHSLLYEYFTVYNELTKVKYVTEGMRKPAFLSGEQKKAIVDLLFKTNRKVTVKQLKEDYFKKIECFDSVEISGVEDRFNASLGTYHDLLKIIKDKDFLDNEENEDILEDIVLTLTLFEDREMIEERLKTYAHLFDDKVMKQLKRRRYTGWGRLSRKLINGIRDKQSGKTILDFLKSDGFANRNFMQLIHDDSLTFKEDIQKAQVSGQGDSLHEHIANLAGSPAIKKGILQTVKVVDELVKVMGRHKPENIVIEMARENQTTQKGQKNSRERMKRIEEGIKELGGSSGSETPGTSESATPESSGSEVEFSHEYWMRHALTLAKRARDEREVPVGAVLVLNNRVIGEGWNRAIGLHDPTAHAEIMALRQGGLVMQNYRLIDATLYVTFEPCVMCAGAMIHSRIGRVVFGVRNAKTGAAGSLMDVLHYPGMNHRVEITEGILADECAALLCYFFRMPRQSQILKEHPVENTQLQNEKLYLYYLQNGRDMYVDQELDINRLSDYDVDHIVPQSFLKDDSIDNKVLTRSDKNRGKSDNVPSEEVVKKMKNYWRQLLNAKLITQRKFDNLTKAERGGLSELDKAGFIKRQLVETRQITKHVAQILDSRMNTKYDENDKLIREVKVITLKSKLVSDFRKDFQFYKVREINNYHHAHDAYLNAVVGTALIKKYPKLESEFVYGDYKVYDVRKMIAKSEQEIGKATAKYFFYSNIMNFFKTEITLANGEIRKRPLIETNGETGEIVWDKGRDFATVRKVLSMPQVNIVKKTEVQTGGFSKESILPKRNSDKLIARKKDWDPKKYGGFDSPTVAYSVLVVAKVEKGKSKKLKSVKELLGITIMERSSFEKNPIDFLEAKGYKEVKKDLIIKLPKYSLFELENGRKRMLASAGELQKGNELALPSKYVNFLYLASHYEKLKGSPEDNEQKQLFVEQHKHYLDEIIEQISEFSKRVILADANLDKVLSAYNKHRDKPIREQAENIIHLFTLTNLGAPAAFKYFDTTIDRKRYTSTKEVLDATLIHQSITGLYETRIDLSQLGGD

SEQ ID NO: 291 - protein, 1541 aa, synthetic construct
  REGION 1..1541: note = 116.2 Cas9 TadAins C-term truncate 791 polypeptide sequence
MDKKYSIGLAIGTNSVGWAVITDEYKVPSKKFKVLGNTDRHSIKKNLIGALLFDSGETAEATRLKRTARRRYTRRKNRICYLQEIFSNEMAKVDDSFFHRLEESFLVEEDKKHERHPIFGNIVDEVAYHEKYPTIYHLRKKLVDSTDKADLRLIYLALAHMIKFRGHFLIEGDLNPDNSDVDKLFIQLVQTYNQLFEENPINASGVDAKAILSARLSKSRRLENLIAQLPGEKKNGLFGNLIALSLGLTPNFKSNFDLAEDAKLQLSKDTYDDDLDNLLAQIGDQYADLFLAAKNLSDAILLSDILRVNTEITKAPLSASMIKRYDEHHQDLTLLKALVRQQLPEKYKEIFFDQSKNGYAGYIDGGASQEEFYKFIKPILEKMDGTEELLVKLNREDLLRKQRTFDNGSIPHQIHLGELHAILRRQEDFYPFLKDNREKIEKILTFRIPYYVGPLARGNSRFAWMTRKSEETITPWNFEEVVDKGASAQSFIERMTNFDKNLPNEKVLPKHSLLYEYFTVYNELTKVKYVTEGMRKPAFLSGEQKKAIVDLLFKTNRKVTVKQLKEDYFKKIECFDSVEISGVEDRFNASLGTYHDLLKIIKDKDFLDNEENEDILEDIVLTLTLFEDREMIEERLKTYAHLFDDKVMKQLKRRRYTGWGRLSRKLINGIRDKQSGKTILDFLKSDGFANRNFMQLIHDDSLTFKEDIQKAQVSGQGDSLHEHIANLAGSPAIKKGILQTVKVVDELVKVMGRHKPENIVIEMARENQTTQKGQKNSRERMKRIEEGIKELGSSGSETPGTSESATPESSGSEVEFSHEYWMRHALTLAKRARDEREVPVGAVLVLNNRVIGEGWNRAIGLHDPTAHAEIMALRQGGLVMQNYRLIDATLYVTFEPCVMCAGAMIHSRIGRVVFGVRNAKTGAAGSLMDVLHYPGMNHRVEITEGILADECAALLCYFFRMPRQGSQILKEHPVENTQLQNEKLYLYYLQNGRDMYVDQELDINRLSDYDVDHIVPQSFLKDDSIDNKVLTRSDKNRGKSDNVPSEEVVKKMKNYWRQLLNAKLITQRKFDNLTKAERGGLSELDKAGFIKRQLVETRQITKHVAQILDSRMNTKYDENDKLIREVKVITLKSKLVSDFRKDFQFYKVREINNYHHAHDAYLNAVVGTALIKKYPKLESEFVYGDYKVYDVRKMIAKSEQEIGKATAKYFFYSNIMNFFKTEITLANGEIRKRPLIETNGETGEIVWDKGRDFATVRKVLSMPQVNIVKKTEVQTGGFSKESILPKRNSDKLIARKKDWDPKKYGGFDSPTVAYSVLVVAKVEKGKSKKLKSVKELLGITIMERSSFEKNPIDFLEAKGYKEVKKDLIIKLPKYSLFELENGRKRMLASAGELQKGNELALPSKYVNFLYLASHYEKLKGSPEDNEQKQLFVEQHKHYLDEIIEQISEFSKRVILADANLDKVLSAYNKHRDKPIREQAENIIHLFTLTNLGAPAAFKYFDTTIDRKRYTSTKEVLDATLIHQSITGLYETRIDLSQLGGD

SEQ ID NO: 292 - protein, 1541 aa, synthetic construct
  REGION 1..1541: note = 116.3 Cas9 TadAins C-term truncate 790 polypeptide sequence
MDKKYSIGLAIGTNSVGWAVITDEYKVPSKKFKVLGNTDRHSIKKNLIGALLFDSGETAEATRLKRTARRRYTRRKNRICYLQEIFSNEMAKVDDSFFHRLEESFLVEEDKKHERHPIFGNIVDEVAYHEKYPTIYHLRKKLVDSTDKADLRLIYLALAHMIKFRGHFLIEGDLNPDNSDVDKLFIQLVQTYNQLFEENPINASGVDAKAILSARLSKSRRLENLIAQLPGEKKNGLFGNLIALSLGLTPNFKSNFDLAEDAKLQLSKDTYDDDLDNLLAQIGDQYADLFLAAKNLSDAILLSDILRVNTEITKAPLSASMIKRYDEHHQDLTLLKALVRQQLPEKYKEIFFDQSKNGYAGYIDGGASQEEFYKFIKPILEKMDGTEELLVKLNREDLLRKQRTFDNGSIPHQIHLGELHAILRRQEDFYPFLKDNREKIEKILTFRIPYYVGPLARGNSRFAWMTRKSEETITPWNFEEVVDKGASAQSFIERMTNFDKNLPNEKVLPKHSLLYEYFTVYNELTKVKYVTEGMRKPAFLSGEQKKAIVDLLFKTNRKVTVKQLKEDYFKKIECFDSVEISGVEDRFNASLGTYHDLLKIIKDKDFLDNEENEDILEDIVLTLTLFEDREMIEERLKTYAHLFDDKVMKQLKRRRYTGWGRLSRKLINGIRDKQSGKTILDFLKSDGFANRNFMQLIHDDSLTFKEDIQKAQVSGQGDSLHEHIANLAGSPAIKKGILQTVKVVDELVKVMGRHKPENIVIEMARENQTTQKGQKNSRERMKRIEEGIKEGSSGSETPGTSESATPESSGSEVEFSHEYWMRHALTLAKRARDEREVPVGAVLVLNNRVIGEGWNRAIGLHDPTAHAEIMALRQGGLVMQNYRLIDATLYVTFEPCVMCAGAMIHSRIGRVVFGVRNAKTGAAGSLMDVLHYPGMNHRVEITEGILADECAALLCYFFRMPRQLGSQILKEHPVENTQLQNEKLYLYYLQNGRDMYVDQELDINRLSDYDVDHIVPQSFLKDDSIDNKVLTRSDKNRGKSDNVPSEEVVKKMKNYWRQLLNAKLITQRKFDNLTKAERGGLSELDKAGFIKRQLVETRQITKHVAQILDSRMNTKYDENDKLIREVKVITLKSKLVSDFRKDFQFYKVREINNYHHAHDAYLNAVVGTALIKKYPKLESEFVYGDYKVYDVRKMIAKSEQEIGKATAKYFFYSNIMNFFKTEITLANGEIRKRPLIETNGETGEIVWDKGRDFATVRKVLSMPQVNIVKKTEVQTGGFSKESILPKRNSDKLIARKKDWDPKKYGGFDSPTVAYSVLVVAKVEKGKSKKLKSVKELLGITIMERSSFEKNPIDFLEAKGYKEVKKDLIIKLPKYSLFELENGRKRMLASAGELQKGNELALPSKYVNFLYLASHYEKLKGSPEDNEQKQLFVEQHKHYLDEIIEQISEFSKRVILADANLDKVLSAYNKHRDKPIREQAENIIHLFTLTNLGAPAAFKYFDTTIDRKRYTSTKEVLDATLIHQSITGLYETRIDLSQLGGD

SEQ ID NO: 293 - protein, 1484 aa, synthetic construct
  REGION 1..1484: note = 117 Cas9 delta 1017-1069 polypeptide sequence
MDKKYSIGLAIGTNSVGWAVITDEYKVPSKKFKVLGNTDRHSIKKNLIGALLFDSGETAEATRLKRTARRRYTRRKNRICYLQEIFSNEMAKVDDSFFHRLEESFLVEEDKKHERHPIFGNIVDEVAYHEKYPTIYHLRKKLVDSTDKADLRLIYLALAHMIKFRGHFLIEGDLNPDNSDVDKLFIQLVQTYNQLFEENPINASGVDAKAILSARLSKSRRLENLIAQLPGEKKNGLFGNLIALSLGLTPNFKSNFDLAEDAKLQLSKDTYDDDLDNLLAQIGDQYADLFLAAKNLSDAILLSDILRVNTEITKAPLSASMIKRYDEHHQDLTLLKALVRQQLPEKYKEIFFDQSKNGYAGYIDGGASQEEFYKFIKPILEKMDGTEELLVKLNREDLLRKQRTFDNGSIPHQIHLGELHAILRRQEDFYPFLKDNREKIEKILTFRIPYYVGPLARGNSRFAWMTRKSEETITPWNFEEVVDKGASAQSFIERMTNFDKNLPNEKVLPKHSLLYEYFTVYNELTKVKYVTEGMRKPAFLSGEQKKAIVDLLFKTNRKVTVKQLKEDYFKKIECFDSVEISGVEDRFNASLGTYHDLLKIIKDKDFLDNEENEDILEDIVLTLTLFEDREMIEERLKTYAHLFDDKVMKQLKRRRYTGWGRLSRKLINGIRDKQSGKTILDFLKSDGFANRNFMQLIHDDSLTFKEDIQKAQVSGQGDSLHEHIANLAGSPAIKKGILQTVKVVDELVKVMGRHKPENIVIEMARENQTTQKGQKNSRERMKRIEEGIKELGSQILKEHPVENTQLQNEKLYLYYLQNGRDMYVDQELDINRLSDYDVDHIVPQSFLKDDSIDNKVLTRSDKNRGKSDNVPSEEVVKKMKNYWRQLLNAKLITQRKFDNLTKAERGGLSELDKAGFIKRQLVETRQITKHVAQILDSRMNTKYDENDKLIREVKVITLKSKLVSDFRKDFQFYKVREINNYHHAHDAYLNAVVGTALIKKYPKLESEFVYGDYKVYSSGSEVEFSHEYWMRHALTLAKRARDEREVPVGAVLVLNNRVIGEGWNRAIGLHDPTAHAEIMALRQGGLVMQNYRLIDATLYVTFEPCVMCAGAMIHSRIGRVVFGVRNAKTGAAGSLMDVLHYPGMNHRVEITEGILADECAALLCYFFRMPRQVFNAQKKAQSSTDGEIVWDKGRDFATVRKVLSMPQVNIVKKTEVQTGGFSKESILPKRNSDKLIARKKDWDPKKYGGFDSPTVAYSVLVVAKVEKGKSKKLKSVKELLGITIMERSSFEKNPIDFLEAKGYKEVKKDLIIKLPKYSLFELENGRKRMLASAGELQKGNELALPSKYVNFLYLASHYEKLKGSPEDNEQKQLFVEQHKHYLDEIIEQISEFSKRVILADANLDKVLSAYNKHRDKPIREQAENIIHLFTLTNLGAPAAFKYFDTTIDRKRYTSTKEVLDATLIHQSITGLYETRIDLSQLGGD

SEQ ID NO: 294 - protein, 1554 aa, synthetic construct
  REGION 1..1554: note = 118 Cas9 TadA-CP116ins 1067 polypeptide sequence
MDKKYSIGLAIGTNSVGWAVITDEYKVPSKKFKVLGNTDRHSIKKNLIGALLFDSGETAEATRLKRTARRRYTRRKNRICYLQEIFSNEMAKVDDSFFHRLEESFLVEEDKKHERHPIFGNIVDEVAYHEKYPTIYHLRKKLVDSTDKADLRLIYLALAHMIKFRGHFLIEGDLNPDNSDVDKLFIQLVQTYNQLFEENPINASGVDAKAILSARLSKSRRLENLIAQLPGEKKNGLFGNLIALSLGLTPNFKSNFDLAEDAKLQLSKDTYDDDLDNLLAQIGDQYADLFLAAKNLSDAILLSDILRVNTEITKAPLSASMIKRYDEHHQDLTLLKALVRQQLPEKYKEIFFDQSKNGYAGYIDGGASQEEFYKFIKPILEKMDGTEELLVKLNREDLLRKQRTFDNGSIPHQIHLGELHAILRRQEDFYPFLKDNREKIEKILTFRIPYYVGPLARGNSRFAWMTRKSEETITPWNFEEVVDKGASAQSFIERMTNFDKNLPNEKVLPKHSLLYEYFTVYNELTKVKYVTEGMRKPAFLSGEQKKAIVDLLFKTNRKVTVKQLKEDYFKKIECFDSVEISGVEDRFNASLGTYHDLLKIIKDKDFLDNEENEDILEDIVLTLTLFEDREMIEERLKTYAHLFDDKVMKQLKRRRYTGWGRLSRKLINGIRDKQSGKTILDFLKSDGFANRNFMQLIHDDSLTFKEDIQKAQVSGQGDSLHEHIANLAGSPAIKKGILQTVKVVDELVKVMGRHKPENIVIEMARENQTTQKGQKNSRERMKRIEEGIKELGSQILKEHPVENTQLQNEKLYLYYLQNGRDMYVDQELDINRLSDYDVDHIVPQSFLKDDSIDNKVLTRSDKNRGKSDNVPSEEVVKKMKNYWRQLLNAKLITQRKFDNLTKAERGGLSELDKAGFIKRQLVETRQITKHVAQILDSRMNTKYDENDKLIREVKVITLKSKLVSDFRKDFQFYKVREINNYHHAHDAYLNAVVGTALIKKYPKLESEFVYGDYKVYDVRKMIAKSEQEIGKATAKYFFYSNIMNFFKTEITLANGEIRKRPLIETNMNHRVEITEGILADECAALLCYFFRMPRQVFNAQKKAQSSTDGSSGSETPGTSESATPESSGSEVEFSHEYWMRHALTLAKRARDEREVPVGAVLVLNNRVIGEGWNRAIGLHDPTAHAEIMALRQGGLVMQNYRLIDATLYVTFEPCVMCAGAMIHSRIGRVVFGVRNAKTGAAGSLMDVLHYPGGETGEIVWDKGRDFATVRKVLSMPQVNIVKKTEVQTGGFSKESILPKRNSDKLIARKKDWDPKKYGGFDSPTVAYSVLVVAKVEKGKSKKLKSVKELLGITIMERSSFEKNPIDFLEAKGYKEVKKDLIIKLPKYSLFELENGRKRMLASAGELQKGNELALPSKYVNFLYLASHYEKLKGSPEDNEQKQLFVEQHKHYLDEIIEQISEFSKRVILADANLDKVLSAYNKHRDKPIREQAENIIHLFTLTNLGAPAAFKYFDTTIDRKRYTSTKEVLDATLIHQSITGLYETRIDLSQLGGD

SEQ ID NO: 295 - protein, 1554 aa, synthetic construct
  REGION 1..1554: note = 119 Cas9 TadAins 701 polypeptide sequence
MDKKYSIGLAIGTNSVGWAVITDEYKVPSKKFKVLGNTDRHSIKKNLIGALLFDSGETAEATRLKRTARRRYTRRKNRICYLQEIFSNEMAKVDDSFFHRLEESFLVEEDKKHERHPIFGNIVDEVAYHEKYPTIYHLRKKLVDSTDKADLRLIYLALAHMIKFRGHFLIEGDLNPDNSDVDKLFIQLVQTYNQLFEENPINASGVDAKAILSARLSKSRRLENLIAQLPGEKKNGLFGNLIALSLGLTPNFKSNFDLAEDAKLQLSKDTYDDDLDNLLAQIGDQYADLFLAAKNLSDAILLSDILRVNTEITKAPLSASMIKRYDEHHQDLTLLKALVRQQLPEKYKEIFFDQSKNGYAGYIDGGASQEEFYKFIKPILEKMDGTEELLVKLNREDLLRKQRTFDNGSIPHQIHLGELHAILRRQEDFYPFLKDNREKIEKILTFRIPYYVGPLARGNSRFAWMTRKSEETITPWNFEEVVDKGASAQSFIERMTNFDKNLPNEKVLPKHSLLYEYFTVYNELTKVKYVTEGMRKPAFLSGEQKKAIVDLLFKTNRKVTVKQLKEDYFKKIECFDSVEISGVEDRFNASLGTYHDLLKIIKDKDFLDNEENEDILEDIVLTLTLFEDREMIEERLKTYAHLFDDKVMKQLKRRRYTGWGRLSRKLINGIRDKQSGKTILDFLKSDGFANRNFMQLIHDDSGSSGSETPGTSESATPESSGSEVEFSHEYWMRHALTLAKRARDEREVPVGAVLVLNNRVIGEGWNRAIGLHDPTAHAEIMALRQGGLVMQNYRLIDATLYVTFEPCVMCAGAMIHSRIGRVVFGVRNAKTGAAGSLMDVLHYPGMNHRVEITEGILADECAALLCYFFRMPRQVFNAQKKAQSSTDLTFKEDIQKAQVSGQGDSLHEHIANLAGSPAIKKGILQTVKVVDELVKVMGRHKPENIVIEMARENQTTQKGQKNSRERMKRIEEGIKELGSQILKEHPVENTQLQNEKLYLYYLQNGRDMYVDQELDINRLSDYDVDHIVPQSFLKDDSIDNKVLTRSDKNRGKSDNVPSEEVVKKMKNYWRQLLNAKLITQRKFDNLTKAERGGLSELDKAGFIKRQLVETRQITKHVAQILDSRMNTKYDENDKLIREVKVITLKSKLVSDFRKDFQFYKVREINNYHHAHDAYLNAVVGTALIKKYPKLESEFVYGDYKVYDVRKMIAKSEQEIGKATAKYFFYSNIMNFFKTEITLANGEIRKRPLIETNGETGEIVWDKGRDFATVRKVLSMPQVNIVKKTEVQTGGFSKESILPKRNSDKLIARKKDWDPKKYGGFDSPTVAYSVLVVAKVEKGKSKKLKSVKELLGITIMERSSFEKNPIDFLEAKGYKEVKKDLIIKLPKYSLFELENGRKRMLASAGELQKGNELALPSKYVNFLYLASHYEKLKGSPEDNEQKQLFVEQHKHYLDEIIEQISEFSKRVILADANLDKVLSAYNKHRDKPIREQAENIIHLFTLTNLGAPAAFKYFDTTIDRKRYTSTKEVLDATLIHQSITGLYETRIDLSQLGGD

SEQ ID NO: 296 - protein, 1554 aa, synthetic construct
  REGION 1..1554: note = 120 Cas9 TadACP136ins 1248 polypeptide sequence
MDKKYSIGLAIGTNSVGWAVITDEYKVPSKKFKVLGNTDRHSIKKNLIGALLFDSGETAEATRLKRTARRRYTRRKNRICYLQEIFSNEMAKVDDSFFHRLEESFLVEEDKKHERHPIFGNIVDEVAYHEKYPTIYHLRKKLVDSTDKADLRLIYLALAHMIKFRGHFLIEGDLNPDNSDVDKLFIQLVQTYNQLFEENPINASGVDAKAILSARLSKSRRLENLIAQLPGEKKNGLFGNLIALSLGLTPNFKSNFDLAEDAKLQLSKDTYDDDLDNLLAQIGDQYADLFLAAKNLSDAILLSDILRVNTEITKAPLSASMIKRYDEHHQDLTLLKALVRQQLPEKYKEIFFDQSKNGYAGYIDGGASQEEFYKFIKPILEKMDGTEELLVKLNREDLLRKQRTFDNGSIPHQIHLGELHAILRRQEDFYPFLKDNREKIEKILTFRIPYYVGPLARGNSRFAWMTRKSEETITPWNFEEVVDKGASAQSFIERMTNFDKNLPNEKVLPKHSLLYEYFTVYNELTKVKYVTEGMRKPAFLSGEQKKAIVDLLFKTNRKVTVKQLKEDYFKKIECFDSVEISGVEDRFNASLGTYHDLLKIIKDKDFLDNEENEDILEDIVLTLTLFEDREMIEERLKTYAHLFDDKVMKQLKRRRYTGWGRLSRKLINGIRDKQSGKTILDFLKSDGFANRNFMQLIHDDSLTFKEDIQKAQVSGQGDSLHEHIANLAGSPAIKKGILQTVKVVDELVKVMGRHKPENIVIEMARENQTTQKGQKNSRERMKRIEEGIKELGSQILKEHPVENTQLQNEKLYLYYLQNGRDMYVDQELDINRLSDYDVDHIVPQSFLKDDSIDNKVLTRSDKNRGKSDNVPSEEVVKKMKNYWRQLLNAKLITQRKFDNLTKAERGGLSELDKAGFIKRQLVETRQITKHVAQILDSRMNTKYDENDKLIREVKVITLKSKLVSDFRKDFQFYKVREINNYHHAHDAYLNAVVGTALIKKYPKLESEFVYGDYKVYDVRKMIAKSEQEIGKATAKYFFYSNIMNFFKTEITLANGEIRKRPLIETNGETGEIVWDKGRDFATVRKVLSMPQVNIVKKTEVQTGGFSKESILPKRNSDKLIARKKDWDPKKYGGFDSPTVAYSVLVVAKVEKGKSKKLKSVKELLGITIMERSSFEKNPIDFLEAKGYKEVKKDLIIKLPKYSLFELENGRKRMLASAGELQKGNELALPSKYVNFLYLASHYEKLKGSMNHRVEITEGILADECAALLCYFFRMPRQVFNAQKKAQSSTDGSSGSETPGTSESATPESSGSEVEFSHEYWMRHALTLAKRARDEREVPVGAVLVLNNRVIGEGWNRAIGLHDPTAHAEIMALRQGGLVMQNYRLIDATLYVTFEPCVMCAGAMIHSRIGRVVFGVRNAKTGAAGSLMDVLHYPGPEDNEQKQLFVEQHKHYLDEIIEQISEFSKRVILADANLDKVLSAYNKHRDKPIREQAENIIHLFTLTNLGAPAAFKYFDTTIDRKRYTSTKEVLDATLIHQSITGLYETRIDLSQLGGD

SEQ ID NO: 297 - protein, 1554 aa, synthetic construct
  REGION 1..1554: note = 121 Cas9 TadACP136ins 1052 polypeptide sequence
MDKKYSIGLAIGTNSVGWAVITDEYKVPSKKFKVLGNTDRHSIKKNLIGALLFDSGETAEATRLKRTARRRYTRRKNRICYLQEIFSNEMAKVDDSFFHRLEESFLVEEDKKHERHPIFGNIVDEVAYHEKYPTIYHLRKKLVDSTDKADLRLIYLALAHMIKFRGHFLIEGDLNPDNSDVDKLFIQLVQTYNQLFEENPINASGVDAKAILSARLSKSRRLENLIAQLPGEKKNGLFGNLIALSLGLTPNFKSNFDLAEDAKLQLSKDTYDDDLDNLLAQIGDQYADLFLAAKNLSDAILLSDILRVNTEITKAPLSASMIKRYDEHHQDLTLLKALVRQQLPEKYKEIFFDQSKNGYAGYIDGGASQEEFYKFIKPILEKMDGTEELLVKLNREDLLRKQRTFDNGSIPHQIHLGELHAILRRQEDFYPFLKDNREKIEKILTFRIPYYVGPLARGNSRFAWMTRKSEETITPWNFEEVVDKGASAQSFIERMTNFDKNLPNEKVLPKHSLLYEYFTVYNELTKVKYVTEGMRKPAFLSGEQKKAIVDLLFKTNRKVTVKQLKEDYFKKIECFDSVEISGVEDRFNASLGTYHDLLKIIKDKDFLDNEENEDILEDIVLTLTLFEDREMIEERLKTYAHLFDDKVMKQLKRRRYTGWGRLSRKLINGIRDKQSGKTILDFLKSDGFANRNFMQLIHDDSLTFKEDIQKAQVSGQGDSLHEHIANLAGSPAIKKGILQTVKVVDELVKVMGRHKPENIVIEMARENQTTQKGQKNSRERMKRIEEGIKELGSQILKEHPVENTQLQNEKLYLYYLQNGRDMYVDQELDINRLSDYDVDHIVPQSFLKDDSIDNKVLTRSDKNRGKSDNVPSEEVVKKMKNYWRQLLNAKLITQRKFDNLTKAERGGLSELDKAGFIKRQLVETRQITKHVAQILDSRMNTKYDENDKLIREVKVITLKSKLVSDFRKDFQFYKVREINNYHHAHDAYLNAVVGTALIKKYPKLESEFVYGDYKVYDVRKMIAKSEQEIGKATAKYFFYSNIMNFFKTEITLAMNHRVEITEGILADECAALLCYFFRMPRQVFNAQKKAQSSTDGSSGSETPGTSESATPESSGSEVEFSHEYWMRHALTLAKRARDEREVPVGAVLVLNNRVIGEGWNRAIGLHDPTAHAEIMALRQGGLVMQNYRLIDATLYVTFEPCVMCAGAMIHSRIGRVVFGVRNAKTGAAGSLMDVLHYPGNGEIRKRPLIETNGETGEIVWDKGRDFATVRKVLSMPQVNIVKKTEVQTGGFSKESILPKRNSDKLIARKKDWDPKKYGGFDSPTVAYSVLVVAKVEKGKSKKLKSVKELLGITIMERSSFEKNPIDFLEAKGYKEVKKDLIIKLPKYSLFELENGRKRMLASAGELQKGNELALPSKYVNFLYLASHYEKLKGSPEDNEQKQLFVEQHKHYLDEIIEQISEFSKRVILADANLDKVLSAYNKHRDKPIREQAENIIHLFTLTNLGAPAAFKYFDTTIDRKRYTSTKEVLDATLIHQSITGLYETRIDLSQLGGD

SEQ ID NO: 298 - protein, 1554 aa, synthetic construct
  REGION 1..1554: note = 122 Cas9 TadACP136ins 1041 polypeptide sequence
MDKKYSIGLAIGTNSVGWAVITDEYKVPSKKFKVLGNTDRHSIKKNLIGALLFDSGETAEATRLKRTARRRYTRRKNRICYLQEIFSNEMAKVDDSFFHRLEESFLVEEDKKHERHPIFGNIVDEVAYHEKYPTIYHLRKKLVDSTDKADLRLIYLALAHMIKFRGHFLIEGDLNPDNSDVDKLFIQLVQTYNQLFEENPINASGVDAKAILSARLSKSRRLENLIAQLPGEKKNGLFGNLIALSLGLTPNFKSNFDLAEDAKLQLSKDTYDDDLDNLLAQIGDQYADLFLAAKNLSDAILLSDILRVNTEITKAPLSASMIKRYDEHHQDLTLLKALVRQQLPEKYKEIFFDQSKNGYAGYIDGGASQEEFYKFIKPILEKMDGTEELLVKLNREDLLRKQRTFDNGSIPHQIHLGELHAILRRQEDFYPFLKDNREKIEKILTFRIPYYVGPLARGNSRFAWMTRKSEETITPWNFEEVVDKGASAQSFIERMTNFDKNLPNEKVLPKHSLLYEYFTVYNELTKVKYVTEGMRKPAFLSGEQKKAIVDLLFKTNRKVTVKQLKEDYFKKIECFDSVEISGVEDRFNASLGTYHDLLKIIKDKDFLDNEENEDILEDIVLTLTLFEDREMIEERLKTYAHLFDDKVMKQLKRRRYTGWGRLSRKLINGIRDKQSGKTILDFLKSDGFANRNFMQLIHDDSLTFKEDIQKAQVSGQGDSLHEHIANLAGSPAIKKGILQTVKVVDELVKVMGRHKPENIVIEMARENQTTQKGQKNSRERMKRIEEGIKELGSQILKEHPVENTQLQNEKLYLYYLQNGRDMYVDQELDINRLSDYDVDHIVPQSFLKDDSIDNKVLTRSDKNRGKSDNVPSEEVVKKMKNYWRQLLNAKLITQRKFDNLTKAERGGLSELDKAGFIKRQLVETRQITKHVAQILDSRMNTKYDENDKLIREVKVITLKSKLVSDFRKDFQFYKVREINNYHHAHDAYLNAVVGTALIKKYPKLESEFVYGDYKVYDVRKMIAKSEQEIGKATAKYFFYSMNHRVEITEGILADECAALLCYFFRMPRQVFNAQKKAQSSTDGSSGSETPGTSESATPESSGSEVEFSHEYWMRHALTLAKRARDEREVPVGAVLVLNNRVIGEGWNRAIGLHDPTAHAEIMALRQGGLVMQNYRLIDATLYVTFEPCVMCAGAMIHSRIGRVVFGVRNAKTGAAGSLMDVLHYPGNIMNFFKTEITLANGEIRKRPLIETNGETGEIVWDKGRDFATVRKVLSMPQVNIVKKTEVQTGGFSKESILPKRNSDKLIARKKDWDPKKYGGFDSPTVAYSVLVVAKVEKGKSKKLKSVKELLGITIMERSSFEKNPIDFLEAKGYKEVKKDLIIKLPKYSLFELENGRKRMLASAGELQKGNELALPSKYVNFLYLASHYEKLKGSPEDNEQKQLFVEQHKHYLDEIIEQISEFSKRVILADANLDKVLSAYNKHRDKPIREQAENIIHLFTLTNLGAPAAFKYFDTTIDRKRYTSTKEVLDATLIHQSITGLYETRIDLSQLGGD

SEQ ID NO: 299 - protein, 1554 aa, synthetic construct
  REGION 1..1554: note = 123 Cas9 TadACP139ins 1299 polypeptide sequence
MDKKYSIGLAIGTNSVGWAVITDEYKVPSKKFKVLGNTDRHSIKKNLIGALLFDSGETAEATRLKRTARRRYTRRKNRICYLQEIFSNEMAKVDDSFFHRLEESFLVEEDKKHERHPIFGNIVDEVAYHEKYPTIYHLRKKLVDSTDKADLRLIYLALAHMIKFRGHFLIEGDLNPDNSDVDKLFIQLVQTYNQLFEENPINASGVDAKAILSARLSKSRRLENLIAQLPGEKKNGLFGNLIALSLGLTPNFKSNFDLAEDAKLQLSKDTYDDDLDNLLAQIGDQYADLFLAAKNLSDAILLSDILRVNTEITKAPLSASMIKRYDEHHQDLTLLKALVRQQLPEKYKEIFFDQSKNGYAGYIDGGASQEEFYKFIKPILEKMDGTEELLVKLNREDLLRKQRTFDNGSIPHQIHLGELHAILRRQEDFYPFLKDNREKIEKILTFRIPYYVGPLARGNSRFAWMTRKSEETITPWNFEEVVDKGASAQSFIERMTNFDKNLPNEKVLPKHSLLYEYFTVYNELTKVKYVTEGMRKPAFLSGEQKKAIVDLLFKTNRKVTVKQLKEDYFKKIECFDSVEISGVEDRFNASLGTYHDLLKIIKDKDFLDNEENEDILEDIVLTLTLFEDREMIEERLKTYAHLFDDKVMKQLKRRRYTGWGRLSRKLINGIRDKQSGKTILDFLKSDGFANRNFMQLIHDDSLTFKEDIQKAQVSGQGDSLHEHIANLAGSPAIKKGILQTVKVVDELVKVMGRHKPENIVIEMARENQTTQKGQKNSRERMKRIEEGIKELGSQILKEHPVENTQLQNEKLYLYYLQNGRDMYVDQELDINRLSDYDVDHIVPQSFLKDDSIDNKVLTRSDKNRGKSDNVPSEEVVKKMKNYWRQLLNAKLITQRKFDNLTKAERGGLSELDKAGFIKRQLVETRQITKHVAQILDSRMNTKYDENDKLIREVKVITLKSKLVSDFRKDFQFYKVREINNYHHAHDAYLNAVVGTALIKKYPKLESEFVYGDYKVYDVRKMIAKSEQEIGKATAKYFFYSNIMNFFKTEITLANGEIRKRPLIETNGETGEIVWDKGRDFATVRKVLSMPQVNIVKKTEVQTGGFSKESILPKRNSDKLIARKKDWDPKKYGGFDSPTVAYSVLVVAKVEKGKSKKLKSVKELLGITIMERSSFEKNPIDFLEAKGYKEVKKDLIIKLPKYSLFELENGRKRMLASAGELQKGNELALPSKYVNFLYLASHYEKLKGSPEDNEQKQLFVEQHKHYLDEIIEQISEFSKRVILADANLDKVLSAYNKHRMNHRVEITEGILADECAALLCYFFRMPRQVFNAQKKAQSSTDGSSGSETPGTSESATPESSGSEVEFSHEYWMRHALTLAKRARDEREVPVGAVLVLNNRVIGEGWNRAIGLHDPTAHAEIMALRQGGLVMQNYRLIDATLYVTFEPCVMCAGAMIHSRIGRVVFGVRNAKTGAAGSLMDVLHYPGDKPIREQAENIIHLFTLTNLGAPAAFKYFDTTIDRKRYTSTKEVLDATLIHQSITGLYETRIDLSQLGGD

SEQ ID NO: 300 - protein, 1454 aa, synthetic construct
  REGION 1..1454: note = 124 Cas9 delta 792-872TadAins polypeptide sequence
MDKKYSIGLAIGTNSVGWAVITDEYKVPSKKFKVLGNTDRHSIKKNLIGALLFDSGETAEATRLKRTARRRYTRRKNRICYLQEIFSNEMAKVDDSFFHRLEESFLVEEDKKHERHPIFGNIVDEVAYHEKYPTIYHLRKKLVDSTDKADLRLIYLALAHMIKFRGHFLIEGDLNPDNSDVDKLFIQLVQTYNQLFEENPINASGVDAKAILSARLSKSRRLENLIAQLPGEKKNGLFGNLIALSLGLTPNFKSNFDLAEDAKLQLSKDTYDDDLDNLLAQIGDQYADLFLAAKNLSDAILLSDILRVNTEITKAPLSASMIKRYDEHHQDLTLLKALVRQQLPEKYKEIFFDQSKNGYAGYIDGGASQEEFYKFIKPILEKMDGTEELLVKLNREDLLRKQRTFDNGSIPHQIHLGELHAILRRQEDFYPFLKDNREKIEKILTFRIPYYVGPLARGNSRFAWMTRKSEETITPWNFEEVVDKGASAQSFIERMTNFDKNLPNEKVLPKHSLLYEYFTVYNELTKVKYVTEGMRKPAFLSGEQKKAIVDLLFKTNRKVTVKQLKEDYFKKIECFDSVEISGVEDRFNASLGTYHDLLKIIKDKDFLDNEENEDILEDIVLTLTLFEDREMIEERLKTYAHLFDDKVMKQLKRRRYTGWGRLSRKLINGIRDKQSGKTILDFLKSDGFANRNFMQLIHDDSLTFKEDIQKAQVSGQGDSLHEHIANLAGSPAIKKGILQTVKVVDELVKVMGRHKPENIVIEMARENQTTQKGQKNSRERMKRIEEGIKELGSEVEFSHEYWMRHALTLAKRARDEREVPVGAVLVLNNRVIGEGWNRAIGLHDPTAHAEIMALRQGGLVMQNYRLIDATLYVTFEPCVMCAGAMIHSRIGRVVFGVRNAKTGAAGSLMDVLHYPGMNHRVEITEGILADECAALLCYFFRMPRQVFNAQKKAQSSTDEEVVKKMKNYWRQLLNAKLITQRKFDNLTKAERGGLSELDKAGFIKRQLVETRQITKHVAQILDSRMNTKYDENDKLIREVKVITLKSKLVSDFRKDFQFYKVREINNYHHAHDAYLNAVVGTALIKKYPKLESEFVYGDYKVYDVRKMIAKSEQEIGKATAKYFFYSNIMNFFKTEITLANGEIRKRPLIETNGETGEIVWDKGRDFATVRKVLSMPQVNIVKKTEVQTGGFSKESILPKRNSDKLIARKKDWDPKKYGGFDSPTVAYSVLVVAKVEKGKSKKLKSVKELLGITIMERSSFEKNPIDFLEAKGYKEVKKDLIIKLPKYSLFELENGRKRMLASAGELQKGNELALPSKYVNFLYLASHYEKLKGSPEDNEQKQLFVEQHKHYLDEIIEQISEFSKRVILADANLDKVLSAYNKHRDKPIREQAENIIHLFTLTNLGAPAAFKYFDTTIDRKRYTSTKEVLDATLIHQSITGLYETRIDLSQLGGD

SEQ ID NO: 301 - protein, 1420 aa, synthetic construct
  REGION 1..1420: note = 125 Cas9 delta 792-906TadAins polypeptide sequence
MDKKYSIGLAIGTNSVGWAVITDEYKVPSKKFKVLGNTDRHSIKKNLIGALLFDSGETAEATRLKRTARRRYTRRKNRICYLQEIFSNEMAKVDDSFFHRLEESFLVEEDKKHERHPIFGNIVDEVAYHEKYPTIYHLRKKLVDSTDKADLRLIYLALAHMIKFRGHFLIEGDLNPDNSDVDKLFIQLVQTYNQLFEENPINASGVDAKAILSARLSKSRRLENLIAQLPGEKKNGLFGNLIALSLGLTPNFKSNFDLAEDAKLQLSKDTYDDDLDNLLAQIGDQYADLFLAAKNLSDAILLSDILRVNTEITKAPLSASMIKRYDEHHQDLTLLKALVRQQLPEKYKEIFFDQSKNGYAGYIDGGASQEEFYKFIKPILEKMDGTEELLVKLNREDLLRKQRTFDNGSIPHQIHLGELHAILRRQEDFYPFLKDNREKIEKILTFRIPYYVGPLARGNSRFAWMTRKSEETITPWNFEEVVDKGASAQSFIERMTNFDKNLPNEKVLPKHSLLYEYFTVYNELTKVKYVTEGMRKPAFLSGEQKKAIVDLLFKTNRKVTVKQLKEDYFKKIECFDSVEISGVEDRFNASLGTYHDLLKIIKDKDFLDNEENEDILEDIVLTLTLFEDREMIEERLKTYAHLFDDKVMKQLKRRRYTGWGRLSRKLINGIRDKQSGKTILDFLKSDGFANRNFMQLIHDDSLTFKEDIQKAQVSGQGDSLHEHIANLAGSPAIKKGILQTVKVVDELVKVMGRHKPENIVIEMARENQTTQKGQKNSRERMKRIEEGIKELGSEVEFSHEYWMRHALTLAKRARDEREVPVGAVLVLNNRVIGEGWNRAIGLHDPTAHAEIMALRQGGLVMQNYRLIDATLYVTFEPCVMCAGAMIHSRIGRVVFGVRNAKTGAAGSLMDVLHYPGMNHRVEITEGILADECAALLCYFFRMPRQVFNAQKKAQSSTDGLSELDKAGFIKRQLVETRQITKHVAQILDSRMNTKYDENDKLIREVKVITLKSKLVSDFRKDFQFYKVREINNYHHAHDAYLNAVVGTALIKKYPKLESEFVYGDYKVYDVRKMIAKSEQEIGKATAKYFFYSNIMNFFKTEITLANGEIRKRPLIETNGETGEIVWDKGRDFATVRKVLSMPQVNIVKKTEVQTGGFSKESILPKRNSDKLIARKKDWDPKKYGGFDSPTVAYSVLVVAKVEKGKSKKLKSVKELLGITIMERSSFEKNPIDFLEAKGYKEVKKDLIIKLPKYSLFELENGRKRMLASAGELQKGNELALPSKYVNFLYLASHYEKLKGSPEDNEQKQLFVEQHKHYLDEIIEQISEFSKRVILADANLDKVLSAYNKHRDKPIREQAENIIHLFTLTNLGAPAAFKYFDTTIDRKRYTSTKEVLDATLIHQSITGLYETRIDLSQLGGD

SEQ ID NO: 302 - protein, 1554 aa, synthetic construct
  REGION 1..1554: note = 126 TadA CP65ins 1003 polypeptide sequence
MDKKYSIGLAIGTNSVGWAVITDEYKVPSKKFKVLGNTDRHSIKKNLIGALLFDSGETAEATRLKRTARRRYTRRKNRICYLQEIFSNEMAKVDDSFFHRLEESFLVEEDKKHERHPIFGNIVDEVAYHEKYPTIYHLRKKLVDSTDKADLRLIYLALAHMIKFRGHFLIEGDLNPDNSDVDKLFIQLVQTYNQLFEENPINASGVDAKAILSARLSKSRRLENLIAQLPGEKKNGLFGNLIALSLGLTPNFKSNFDLAEDAKLQLSKDTYDDDLDNLLAQIGDQYADLFLAAKNLSDAILLSDILRVNTEITKAPLSASMIKRYDEHHQDLTLLKALVRQQLPEKYKEIFFDQSKNGYAGYIDGGASQEEFYKFIKPILEKMDGTEELLVKLNREDLLRKQRTFDNGSIPHQIHLGELHAILRRQEDFYPFLKDNREKIEKILTFRIPYYVGPLARGNSRFAWMTRKSEETITPWNFEEVVDKGASAQSFIERMTNFDKNLPNEKVLPKHSLLYEYFTVYNELTKVKYVTEGMRKPAFLSGEQKKAIVDLLFKTNRKVTVKQLKEDYFKKIECFDSVEISGVEDRFNASLGTYHDLLKIIKDKDFLDNEENEDILEDIVLTLTLFEDREMIEERLKTYAHLFDDKVMKQLKRRRYTGWGRLSRKLINGIRDKQSGKTILDFLKSDGFANRNFMQLIHDDSLTFKEDIQKAQVSGQGDSLHEHIANLAGSPAIKKGILQTVKVVDELVKVMGRHKPENIVIEMARENQTTQKGQKNSRERMKRIEEGIKELGSQILKEHPVENTQLQNEKLYLYYLQNGRDMYVDQELDINRLSDYDVDHIVPQSFLKDDSIDNKVLTRSDKNRGKSDNVPSEEVVKKMKNYWRQLLNAKLITQRKFDNLTKAERGGLSELDKAGFIKRQLVETRQITKHVAQILDSRMNTKYDENDKLIREVKVITLKSKLVSDFRKDFQFYKVREINNYHHAHDAYLNAVVGTALIKKYPKTAHAEIMALRQGGLVMQNYRLIDATLYVTFEPCVMCAGAMIHSRIGRVVFGVRNAKTGAAGSLMDVLHYPGMNHRVEITEGILADECAALLCYFFRMPRQVFNAQKKAQSSTDGSSGSETPGTSESATPESSGSEVEFSHEYWMRHALTLAKRARDEREVPVGAVLVLNNRVIGEGWNRAIGLHDPLESEFVYGDYKVYDVRKMIAKSEQEIGKATAKYFFYSNIMNFFKTEITLANGEIRKRPLIETNGETGEIVWDKGRDFATVRKVLSMPQVNIVKKTEVQTGGFSKESILPKRNSDKLIARKKDWDPKKYGGFDSPTVAYSVLVVAKVEKGKSKKLKSVKELLGITIMERSSFEKNPIDFLEAKGYKEVKKDLIIKLPKYSLFELENGRKRMLASAGELQKGNELALPSKYVNFLYLASHYEKLKGSPEDNEQKQLFVEQHKHYLDEIIEQISEFSKRVILADANLDKVLSAYNKHRDKPIREQAENIIHLFTLTNLGAPAAFKYFDTTIDRKRYTSTKEVLDATLIHQSITGLYETRIDLSQLGGD

SEQ ID NO: 303 - protein, 1554 aa, synthetic construct
  REGION 1..1554: note = 127 TadA CP65ins 1016 polypeptide sequence
MDKKYSIGLAIGTNSVGWAVITDEYKVPSKKFKVLGNTDRHSIKKNLIGALLFDSGETAEATRLKRTARRRYTRRKNRICYLQEIFSNEMAKVDDSFFHRLEESFLVEEDKKHERHPIFGNIVDEVAYHEKYPTIYHLRKKLVDSTDKADLRLIYLALAHMIKFRGHFLIEGDLNPDNSDVDKLFIQLVQTYNQLFEENPINASGVDAKAILSARLSKSRRLENLIAQLPGEKKNGLFGNLIALSLGLTPNFKSNFDLAEDAKLQLSKDTYDDDLDNLLAQIGDQYADLFLAAKNLSDAILLSDILRVNTEITKAPLSASMIKRYDEHHQDLTLLKALVRQQLPEKYKEIFFDQSKNGYAGYIDGGASQEEFYKFIKPILEKMDGTEELLVKLNREDLLRKQRTFDNGSIPHQIHLGELHAILRRQEDFYPFLKDNREKIEKILTFRIPYYVGPLARGNSRFAWMTRKSEETITPWNFEEVVDKGASAQSFIERMTNFDKNLPNEKVLPKHSLLYEYFTVYNELTKVKYVTEGMRKPAFLSGEQKKAIVDLLFKTNRKVTVKQLKEDYFKKIECFDSVEISGVEDRFNASLGTYHDLLKIIKDKDFLDNEENEDILEDIVLTLTLFEDREMIEERLKTYAHLFDDKVMKQLKRRRYTGWGRLSRKLINGIRDKQSGKTILDFLKSDGFANRNFMQLIHDDSLTFKEDIQKAQVSGQGDSLHEHIANLAGSPAIKKGILQTVKVVDELVKVMGRHKPENIVIEMARENQTTQKGQKNSRERMKRIEEGIKELGSQILKEHPVENTQLQNEKLYLYYLQNGRDMYVDQELDINRLSDYDVDHIVPQSFLKDDSIDNKVLTRSDKNRGKSDNVPSEEVVKKMKNYWRQLLNAKLITQRKFDNLTKAERGGLSELDKAGFIKRQLVETRQITKHVAQILDSRMNTKYDENDKLIREVKVITLKSKLVSDFRKDFQFYKVREINNYHHAHDAYLNAVVGTALIKKYPKLESEFVYGDYKVTAHAEIMALRQGGLVMQNYRLIDATLYVTFEPCVMCAGAMIHSRIGRVVFGVRNAKTGAAGSLMDVLHYPGMNHRVEITEGILADECAALLCYFFRMPRQVFNAQKKAQSSTDGSSGSETPGTSESATPESSGSEVEFSHEYWMRHALTLAKRARDEREVPVGAVLVLNNRVIGEGWNRAIGLHDPYDVRKMIAKSEQEIGKATAKYFFYSNIMNFFKTEITLANGEIRKRPLIETNGETGEIVWDKGRDFATVRKVLSMPQVNIVKKTEVQTGGFSKESILPKRNSDKLIARKKDWDPKKYGGFDSPTVAYSVLVVAKVEKGKSKKLKSVKELLGITIMERSSFEKNPIDFLEAKGYKEVKKDLIIKLPKYSLFELENGRKRMLASAGELQKGNELALPSKYVNFLYLASHYEKLKGSPEDNEQKQLFVEQHKHYLDEIIEQISEFSKRVILADANLDKVLSAYNKHRDKPIREQAENIIHLFTLTNLGAPAAFKYFDTTIDRKRYTSTKEVLDATLIHQSITGLYETRIDLSQLGGD

SEQ ID NO: 304 - protein, 1554 aa, synthetic construct
  REGION 1..1554: note = 128 TadA CP65ins 1022 polypeptide sequence
MDKKYSIGLAIGTNSVGWAVITDEYKVPSKKFKVLGNTDRHSIKKNLIGALLFDSGETAEATRLKRTARRRYTRRKNRICYLQEIFSNEMAKVDDSFFHRLEESFLVEEDKKHERHPIFGNIVDEVAYHEKYPTIYHLRKKLVDSTDKADLRLIYLALAHMIKFRGHFLIEGDLNPDNSDVDKLFIQLVQTYNQLFEENPINASGVDAKAILSARLSKSRRLENLIAQLPGEKKNGLFGNLIALSLGLTPNFKSNFDLAEDAKLQLSKDTYDDDLDNLLAQIGDQYADLFLAAKNLSDAILLSDILRVNTEITKAPLSASMIKRYDEHHQDLTLLKALVRQQLPEKYKEIFFDQSKNGYAGYIDGGASQEEFYKFIKPILEKMDGTEELLVKLNREDLLRKQRTFDNGSIPHQIHLGELHAILRRQEDFYPFLKDNREKIEKILTFRIPYYVGPLARGNSRFAWMTRKSEETITPWNFEEVVDKGASAQSFIERMTNFDKNLPNEKVLPKHSLLYEYFTVYNELTKVKYVTEGMRKPAFLSGEQKKAIVDLLFKTNRKVTVKQLKEDYFKKIECFDSVEISGVEDRFNASLGTYHDLLKIIKDKDFLDNEENEDILEDIVLTLTLFEDREMIEERLKTYAHLFDDKVMKQLKRRRYTGWGRLSRKLINGIRDKQSGKTILDFLKSDGFANRNFMQLIHDDSLTFKEDIQKAQVSGQGDSLHEHIANLAGSPAIKKGILQTVKVVDELVKVMGRHKPENIVIEMARENQTTQKGQKNSRERMKRIEEGIKELGSQILKEHPVENTQLQNEKLYLYYLQNGRDMYVDQELDINRLSDYDVDHIVPQSFLKDDSIDNKVLTRSDKNRGKSDNVPSEEVVKKMKNYWRQLLNAKLITQRKFDNLTKAERGGLSELDKAGFIKRQLVETRQITKHVAQILDSRMNTKYDENDKLIREVKVITLKSKLVSDFRKDFQFYKVREINNYHHAHDAYLNAVVGTALIKKYPKLESEFVYGDYKVYDVRKMITAHAEIMALRQGGLVMQNYRLIDATLYVTFEPCVMCAGAMIHSRIGRVVFGVRNAKTGAAGSLMDVLHYPGMNHRVEITEGILADECAALLCYFFRMPRQVFNAQKKAQSSTDGSSGSETPGTSESATPESSGSEVEFSHEYWMRHALTLAKRARDEREVPVGAVLVLNNRVIGEGWNRAIGLHDPAKSEQEIGKATAKYFFYSNIMNFFKTEITLANGEIRKRPLIETNGETGEIVWDKGRDFATVRKVLSMPQVNIVKKTEVQTGGFSKESILPKRNSDKLIARKKDWDPKKYGGFDSPTVAYSVLVVAKVEKGKSKKLKSVKELLGITIMERSSFEKNPIDFLEAKGYKEVKKDLIIKLPKYSLFELENGRKRMLASAGELQKGNELALPSKYVNFLYLASHYEKLKGSPEDNEQKQLFVEQHKHYLDEIIEQISEFSKRVILADANLDKVLSAYNKHRDKPIREQAENIIHLFTLTNLGAPAAFKYFDTTIDRKRYTSTKEVLDATLIHQSITGLYETRIDLSQLGGD

SEQ ID NO: 305 - protein, 1554 aa, synthetic construct
  REGION 1..1554: note = 129 TadA CP65ins 1029 polypeptide sequence
MDKKYSIGLAIGTNSVGWAVITDEYKVPSKKFKVLGNTDRHSIKKNLIGALLFDSGETAEATRLKRTARRRYTRRKNRICYLQEIFSNEMAKVDDSFFHRLEESFLVEEDKKHERHPIFGNIVDEVAYHEKYPTIYHLRKKLVDSTDKADLRLIYLALAHMIKFRGHFLIEGDLNPDNSDVDKLFIQLVQTYNQLFEENPINASGVDAKAILSARLSKSRRLENLIAQLPGEKKNGLFGNLIALSLGLTPNFKSNFDLAEDAKLQLSKDTYDDDLDNLLAQIGDQYADLFLAAKNLSDAILLSDILRVNTEITKAPLSASMIKRYDEHHQDLTLLKALVRQQLPEKYKEIFFDQSKNGYAGYIDGGASQEEFYKFIKPILEKMDGTEELLVKLNREDLLRKQRTFDNGSIPHQIHLGELHAILRRQEDFYPFLKDNREKIEKILTFRIPYYVGPLARGNSRFAWMTRKSEETITPWNFEEVVDKGASAQSFIERMTNFDKNLPNEKVLPKHSLLYEYFTVYNELTKVKYVTEGMRKPAFLSGEQKKAIVDLLFKTNRKVTVKQLKEDYFKKIECFDSVEISGVEDRFNASLGTYHDLLKIIKDKDFLDNEENEDILEDIVLTLTLFEDREMIEERLKTYAHLFDDKVMKQLKRRRYTGWGRLSRKLINGIRDKQSGKTILDFLKSDGFANRNFMQLIHDDSLTFKEDIQKAQVSGQGDSLHEHIANLAGSPAIKKGILQTVKVVDELVKVMGRHKPENIVIEMARENQTTQKGQKNSRERMKRIEEGIKELGSQILKEHPVENTQLQNEKLYLYYLQNGRDMYVDQELDINRLSDYDVDHIVPQSFLKDDSIDNKVLTRSDKNRGKSDNVPSEEVVKKMKNYWRQLLNAKLITQRKFDNLTKAERGGLSELDKAGFIKRQLVETRQITKHVAQILDSRMNTKYDENDKLIREVKVITLKSKLVSDFRKDFQFYKVREINNYHHAHDAYLNAVVGTALIKKYPKLESEFVYGDYKVYDVRKMIAKSEQEITAHAEIMALRQGGLVMQNYRLIDATLYVTFEPCVMCAGAMIHSRIGRVVFGVRNAKTGAAGSLMDVLHYPGMNHRVEITEGILADECAALLCYFFRMPRQVFNAQKKAQSSTDGSSGSETPGTSESATPESSGSEVEFSHEYWMRHALTLAKRARDEREVPVGAVLVLNNRVIGEGWNRAIGLHDPGKATAKYFFYSNIMNFFKTEITLANGEIRKRPLIETNGETGEIVWDKGRDFATVRKVLSMPQVNIVKKTEVQTGGFSKESILPKRNSDKLIARKKDWDPKKYGGFDSPTVAYSVLVVAKVEKGKSKKLKSVKELLGITIMERSSFEKNPIDFLEAKGYKEVKKDLIIKLPKYSLFELENGRKRMLASAGELQKGNELALPSKYVNFLYLASHYEKLKGSPEDNEQKQLFVEQHKHYLDEIIEQISEFSKRVILADANLDKVLSAYNKHRDKPIREQAENIIHLFTLTNLGAPAAFKYFDTTIDRKRYTSTKEVLDATLIHQSITGLYETRIDLSQLGGD

SEQ ID NO: 306 - protein, 1554 aa, synthetic construct
  REGION 1..1554: note = 130 TadA CP65ins 1041 polypeptide sequence
MDKKYSIGLAIGTNSVGWAVITDEYKVPSKKFKVLGNTDRHSIKKNLIGALLFDSGETAEATRLKRTARRRYTRRKNRICYLQEIFSNEMAKVDDSFFHRLEESFLVEEDKKHERHPIFGNIVDEVAYHEKYPTIYHLRKKLVDSTDKADLRLIYLALAHMIKFRGHFLIEGDLNPDNSDVDKLFIQLVQTYNQLFEENPINASGVDAKAILSARLSKSRRLENLIAQLPGEKKNGLFGNLIALSLGLTPNFKSNFDLAEDAKLQLSKDTYDDDLDNLLAQIGDQYADLFLAAKNLSDAILLSDILRVNTEITKAPLSASMIKRYDEHHQDLTLLKALVRQQLPEKYKEIFFDQSKNGYAGYIDGGASQEEFYKFIKPILEKMDGTEELLVKLNREDLLRKQRTFDNGSIPHQIHLGELHAILRRQEDFYPFLKDNREKIEKILTFRIPYYVGPLARGNSRFAWMTRKSEETITPWNFEEVVDKGASAQSFIERMTNFDKNLPNEKVLPKHSLLYEYFTVYNELTKVKYVTEGMRKPAFLSGEQKKAIVDLLFKTNRKVTVKQLKEDYFKKIECFDSVEISGVEDRFNASLGTYHDLLKIIKDKDFLDNEENEDILEDIVLTLTLFEDREMIEERLKTYAHLFDDKVMKQLKRRRYTGWGRLSRKLINGIRDKQSGKTILDFLKSDGFANRNFMQLIHDDSLTFKEDIQKAQVSGQGDSLHEHIANLAGSPAIKKGILQTVKVVDELVKVMGRHKPENIVIEMARENQTTQKGQKNSRERMKRIEEGIKELGSQILKEHPVENTQLQNEKLYLYYLQNGRDMYVDQELDINRLSDYDVDHIVPQSFLKDDSIDNKVLTRSDKNRGKSDNVPSEEVVKKMKNYWRQLLNAKLITQRKFDNLTKAERGGLSELDKAGFIKRQLVETRQITKHVAQILDSRMNTKYDENDKLIREVKVITLKSKLVSDFRKDFQFYKVREINNYHHAHDAYLNAVVGTALIKKYPKLESEFVYGDYKVYDVRKMIAKSEQEIGKATAKYFFYSTAHAEIMALRQGGLVMQNYRLIDATLYVTFEPCVMCAGAMIHSRIGRVVFGVRNAKTGAAGSLMDVLHYPGMNHRVEITEGILADECAALLCYFFRMPRQVFNAQKKAQSSTDGSSGSETPGTSESATPESSGSEVEFSHEYWMRHALTLAKRARDEREVPVGAVLVLNNRVIGEGWNRAIGLHDPNIMNFFKTEITLANGEIRKRPLIETNGETGEIVWDKGRDFATVRKVLSMPQVNIVKKTEVQTGGFSKESILPKRNSDKLIARKKDWDPKKYGGFDSPTVAYSVLVVAKVEKGKSKKLKSVKELLGITIMERSSFEKNPIDFLEAKGYKEVKKDLIIKLPKYSLFELENGRKRMLASAGELQKGNELALPSKYVNFLYLASHYEKLKGSPEDNEQKQLFVEQHKHYLDEIIEQISEFSKRVILADANLDKVLSAYNKHRDKPIREQAENIIHLFTLTNLGAPAAFKYFDTTIDRKRYTSTKEVLDATLIHQSITGLYETRIDLSQLGGD

SEQ ID NO: 307 - protein, 1554 aa, synthetic construct
  REGION 1..1554: note = 131 TadA CP65ins 1054 polypeptide sequence
MDKKYSIGLAIGTNSVGWAVITDEYKVPSKKFKVLGNTDRHSIKKNLIGALLFDSGETAEATRLKRTARRRYTRRKNRICYLQEIFSNEMAKVDDSFFHRLEESFLVEEDKKHERHPIFGNIVDEVAYHEKYPTIYHLRKKLVDSTDKADLRLIYLALAHMIKFRGHFLIEGDLNPDNSDVDKLFIQLVQTYNQLFEENPINASGVDAKAILSARLSKSRRLENLIAQLPGEKKNGLFGNLIALSLGLTPNFKSNFDLAEDAKLQLSKDTYDDDLDNLLAQIGDQYADLFLAAKNLSDAILLSDILRVNTEITKAPLSASMIKRYDEHHQDLTLLKALVRQQLPEKYKEIFFDQSKNGYAGYIDGGASQEEFYKFIKPILEKMDGTEELLVKLNREDLLRKQRTFDNGSIPHQIHLGELHAILRRQEDFYPFLKDNREKIEKILTFRIPYYVGPLARGNSRFAWMTRKSEETITPWNFEEVVDKGASAQSFIERMTNFDKNLPNEKVLPKHSLLYEYFTVYNELTKVKYVTEGMRKPAFLSGEQKKAIVDLLFKTNRKVTVKQLKEDYFKKIECFDSVEISGVEDRFNASLGTYHDLLKIIKDKDFLDNEENEDILEDIVLTLTLFEDREMIEERLKTYAHLFDDKVMKQLKRRRYTGWGRLSRKLINGIRDKQSGKTILDFLKSDGFANRNFMQLIHDDSLTFKEDIQKAQVSGQGDSLHEHIANLAGSPAIKKGILQTVKVVDELVKVMGRHKPENIVIEMARENQTTQKGQKNSRERMKRIEEGIKELGSQILKEHPVENTQLQNEKLYLYYLQNGRDMYVDQELDINRLSDYDVDHIVPQSFLKDDSIDNKVLTRSDKNRGKSDNVPSEEVVKKMKNYWRQLLNAKLITQRKFDNLTKAERGGLSELDKAGFIKRQLVETRQITKHVAQILDSRMNTKYDENDKLIREVKVITLKSKLVSDFRKDFQFYKVREINNYHHAHDAYLNAVVGTALIKKYPKLESEFVYGDYKVYDVRKMIAKSEQEIGKATAKYFFYSNIMNFFKTEITLANTAHAEIMALRQGGLVMQNYRLIDATLYVTFEPCVMCAGAMIHSRIGRVVFGVRNAKTGAAGSLMDVLHYPGMNHRVEITEGILADECAALLCYFFRMPRQVFNAQKKAQSSTDGSSGSETPGTSESATPESSGSEVEFSHEYWMRHALTLAKRARDEREVPVGAVLVLNNRVIGEGWNRAIGLHDPGEIRKRPLIETNGETGEIVWDKGRDFATVRKVLSMPQVNIVKKTEVQTGGFSKESILPKRNSDKLIARKKDWDPKKYGGFDSPTVAYSVLVVAKVEKGKSKKLKSVKELLGITIMERSSFEKNPIDFLEAKGYKEVKKDLIIKLPKYSLFELENGRKRMLASAGELQKGNELALPSKYVNFLYLASHYEKLKGSPEDNEQKQLFVEQHKHYLDEIIEQISEFSKRVILADANLDKVLSAYNKHRDKPIREQAENIIHLFTLTNLGAPAAFKYFDTTIDRKRYTSTKEVLDATLIHQSITGLYETRIDLSQLGGD

SEQ ID NO: 308 - protein, 1554 aa, synthetic construct
  REGION 1..1554: note = 132 TadA CP65ins 1246 polypeptide sequence
MDKKYSIGLAIGTNSVGWAVITDEYKVPSKKFKVLGNTDRHSIKKNLIGALLFDSGETAEATRLKRTARRRYTRRKNRICYLQEIFSNEMAKVDDSFFHRLEESFLVEEDKKHERHPIFGNIVDEVAYHEKYPTIYHLRKKLVDSTDKADLRLIYLALAHMIKFRGHFLIEGDLNPDNSDVDKLFIQLVQTYNQLFEENPINASGVDAKAILSARLSKSRRLENLIAQLPGEKKNGLFGNLIALSLGLTPNFKSNFDLAEDAKLQLSKDTYDDDLDNLLAQIGDQYADLFLAAKNLSDAILLSDILRVNTEITKAPLSASMIKRYDEHHQDLTLLKALVRQQLPEKYKEIFFDQSKNGYAGYIDGGASQEEFYKFIKPILEKMDGTEELLVKLNREDLLRKQRTFDNGSIPHQIHLGELHAILRRQEDFYPFLKDNREKIEKILTFRIPYYVGPLARGNSRFAWMTRKSEETITPWNFEEVVDKGASAQSFIERMTNFDKNLPNEKVLPKHSLLYEYFTVYNELTKVKYVTEGMRKPAFLSGEQKKAIVDLLFKTNRKVTVKQLKEDYFKKIECFDSVEISGVEDRFNASLGTYHDLLKIIKDKDFLDNEENEDILEDIVLTLTLFEDREMIEERLKTYAHLFDDKVMKQLKRRRYTGWGRLSRKLINGIRDKQSGKTILDFLKSDGFANRNFMQLIHDDSLTFKEDIQKAQVSGQGDSLHEHIANLAGSPAIKKGILQTVKVVDELVKVMGRHKPENIVIEMARENQTTQKGQKNSRERMKRIEEGIKELGSQILKEHPVENTQLQNEKLYLYYLQNGRDMYVDQELDINRLSDYDVDHIVPQSFLKDDSIDNKVLTRSDKNRGKSDNVPSEEVVKKMKNYWRQLLNAKLITQRKFDNLTKAERGGLSELDKAGFIKRQLVETRQITKHVAQILDSRMNTKYDENDKLIREVKVITLKSKLVSDFRKDFQFYKVREINNYHHAHDAYLNAVVGTALIKKYPKLESEFVYGDYKVYDVRKMIAKSEQEIGKATAKYFFYSNIMNFFKTEITLANGEIRKRPLIETNGETGEIVWDKGRDFATVRKVLSMPQVNIVKKTEVQTGGFSKESILPKRNSDKLIARKKDWDPKKYGGFDSPTVAYSVLVVAKVEKGKSKKLKSVKELLGITIMERSSFEKNPIDFLEAKGYKEVKKDLIIKLPKYSLFELENGRKRMLASAGELQKGNELALPSKYVNFLYLASHYEKLKGTAHAEIMALRQGGLVMQNYRLIDATLYVTFEPCVMCAGAMIHSRIGRVVFGVRNAKTGAAGSLMDVLHYPGMNHRVEITEGILADECAALLCYFFRMPRQVFNAQKKAQSSTDGSSGSETPGTSESATPESSGSEVEFSHEYWMRHALTLAKRARDEREVPVGAVLVLNNRVIGEGWNRAIGLHDPSPEDNEQKQLFVEQHKHYLDEIIEQISEFSKRVILADANLDKVLSAYNKHRDKPIREQAENIIHLFTLTNLGAPAAFKYFDTTIDRKRYTSTKEVLDATLIHQSITGLYETRIDLSQLGGD

SEQ ID NO: 309 - protein, 160 aa, Staphylococcus aureus
  REGION 1..160: note = MISC_FEATURE - TadA polypeptide sequence
MGSHMTNDIYFMTLAIEEAKKAAQLGEVPIGAIITKDDEVIARAHNLRETLQQPTAHAEHIAIERAAKVLGSWRLEGCTLYVTLEPCVMCAGTIVMSRIPRVVYGADDPKGGCSGSLMNLLQQSNFNHRAIVDKGVLKEACSTLLTTFFKNLRANKKSTN

SEQ ID NO: 310 - protein, 161 aa, Bacillus subtilis
  REGION 1..161: note = MISC_FEATURE - TadA polypeptide sequence
MTQDELYMKEAIKEAKKAEEKGEVPIGAVLVINGEIIARAHNLRETEQRSIAHAEMLVIDEACKALGTWRLEGATLYVTLEPCPMCAGAVVLSRVEKVVFGAFDPKGGCSGTLMNLLQEERFNHQAEVVSGVLEEECGGMLSAFFRELRKKKKAARKNLSE

SEQ ID NO: 311 - protein, 183 aa, Salmonella enterica
  REGION 1..183: note = MISC_FEATURE - TadA polypeptide sequence
  source 1..183: note = serovar Typhimurium
MPPAFITGVTSLSDVELDHEYWMRHALTLAKRAWDEREVPVGAVLVHNHRVIGEGWNRPIGRHDPTAHAEIMALRQGGLVLQNYRLLDTTLYVTLEPCVMCAGAMVHSRIGRVVFGARDAKTGAAGSLIDVLHHPGMNHRVEIIEGVLRDECATLLSDFFRMRRQEIKALKKADRAEGAGPAV

SEQ ID NO: 312 - protein, 164 aa, Shewanella putrefaciens
  REGION 1..164: note = MISC_FEATURE - TadA polypeptide sequence
MDEYWMQVAMQMAEKAEAAGEVPVGAVLVKDGQQIATGYNLSISQHDPTAHAEILCLRSAGKKLENYRLLDATLYITLEPCAMCAGAMVHSRIARVVYGARDEKTGAAGTVVNLLQHPAFNHQVEVTSGVLAEACSAQLSRFFKRRRDEKKALKLAQRAQQGIE

SEQ ID NO: 313 - protein, 173 aa, Haemophilus influenzae
  REGION 1..173: note = MISC_FEATURE - TadA polypeptide sequence
MDAAKVRSEFDEKMMRYALELADKAEALGEIPVGAVLVDDARNIIGEGWNLSIVQSDPTAHAEIIALRNGAKNIQNYRLLNSTLYVTLEPCTMCAGAILHSRIKRLVFGASDYKTGAIGSRFHFFDDYKMNHTLEITSGVLAEECSQKLSTFFQKRREEKKIEKALLKSLSDK

SEQ ID NO: 314 - protein, 161 aa, Caulobacter crescentus
  REGION 1..161: note = MISC_FEATURE - TadA polypeptide sequence
MRTDESEDQDHRMMRLALDAARAAAEAGETPVGAVILDPSTGEVIATAGNGPIAAHDPTAHAEIAAMRAAAAKLGNYRLTDLTLVVTLEPCAMCAGAISHARIGRVVFGADDPKGGAVVHGPKFFAQPTCHWRPEVTGGVLADESADLLRGFFRARRKAKI

SEQ ID NO: 315 - protein, 179 aa, Geobacter sulfurreducens
  REGION 1..179: note = MISC_FEATURE - TadA polypeptide sequence
MSSLKKTPIRDDAYWMGKAIREAAKAAARDEVPIGAVIVRDGAVIGRGHNLREGSNDPSAHAEMIAIRQAARRSANWRLTGATLYVTLEPCLMCMGAIILARLERVVFGCYDPKGGAAGSLYDLSADPRLNHQVRLSPGVCQEECGTMLSDFFRDLRRRKKAKATPALFIDERKVPPEP

SEQ ID NO: 316 - protein, 167 aa, synthetic construct
  REGION 1..167: note = TadA*8 polypeptide sequence
MSEVEFSHEYWMRHALTLAKRARDEREVPVGAVLVLNNRVIGEGWNRAIGLHDPTAHAEIMALRQGGLVMQNYRLIDATLYVTFEPCVMCAGAMIHSRIGRVVFGVRNAKTGAAGSLMDVLHYPGMNHRVEITEGILADECAALLCTFFRMPRQVFNAQKKAQSSTD

SEQ ID NO: 317 - RNA, 80 nt, synthetic construct
  misc_feature 1..80: note = gRNA scaffold polynucleotide sequence
  source 1..80: mol_type = other RNA
gttttagagctagaaatagcaagttaaaataaggctagtccgttatcaacttgaaaaagtggcaccgagtcggtgctttt

SEQ ID NO: 318 - RNA, 125 nt, synthetic construct
  misc_feature 1..125: note = gRNA scaffold polynucleotide sequence
  source 1..125: mol_type = other RNA
gtttttgtactctcaagatttaagtaactgtacaacgaaacttacacagttacttaaatcttgcagaagctacaaagataaggcttcatgccgaaatcaacaccctgtcattttatggcagggtg

SEQ ID NO: 319 - RNA, 76 nt, Streptococcus pyogenes
  misc_feature 1..76: note = S. pyogenes gRNA scaffold oligonucleotide sequence
  source 1..76: mol_type = other RNA
gttttagagctagaaatagcaagttaaaataaggctagtccgttatcaacttgaaaaagtggcaccgagtcggtgc

SEQ ID NO: 320 - RNA, 84 nt, Staphylococcus aureus
  misc_feature 1..84: note = S. aureus gRNA scaffold oligonucleotide sequence
  source 1..84: mol_type = other RNA
gttttagtactctgtaatgaaaattacagaatctactaaaacaaggcaaaatgccgtgtttatctcgtcaacttgttggcgaga

SEQ ID NO: 321 - RNA, 97 nt, Bacillus hisashii
  misc_feature 1..97: note = BhCas12b gRNA scaffold oligonucleotide sequence
  source 1..97: mol_type = other RNA
gttctgtcttttggtcaggacaaccgtctagctataagtgctgcagggtgtgagaaactcctattgctggacgatgtctcttacgaggcattagcac

SEQ ID NO: 322 - RNA, 88 nt, Bacillus sp.
  misc_feature 1..88: note = BvCas12b gRNA scaffold oligonucleotide sequence
  source 1..88: mol_type = other RNA
gacctatagggtcaatgaatctgtgcgtgtgccataagtaattaaaaattacccaccacaggagcacctgaaaacaggtgcttggcac

SEQ ID NO: 323 - RNA, 80 nt, synthetic construct
  misc_feature 1..80: note = gRNA scaffold nucleotide sequence; oligonucleotide sequence
  modified_base 78..80: mod_base = um
  misc_feature 78..80: note = In embodiments, a nucleotide(s) is linked to the preceding 5' nucleotide by a 3' phosphorothioate internucleotide linkage
  source 1..80: mol_type = other RNA
gttttagagctagaaatagcaagttaaaataaggctagtccgttatcaacttgaaaaagtgggaccgagtcggtgctttt

SEQ ID NO: 324 - RNA, 80 nt, synthetic construct; identical to SEQ ID NO: 317
  misc_feature 1..80: note = gRNA scaffold nucleotide sequence
  misc_feature 78..80: note = In embodiments, a nucleotide(s) is linked to the preceding 5' nucleotide by a 3' phosphorothioate internucleotide linkage
  modified_base 78..80: mod_base = um
  source 1..80: mol_type = other RNA

SEQ ID NO: 325 - RNA, 117 nt, Bacillus hisashii
  misc_feature 1..117: note = BhCas12b gRNA scaffold + guide sequence; oligonucleotide sequence
  misc_feature 1..97: note = BhCas12b sgRNA scaffold
  source 1..117: mol_type = other RNA
gttctgtcttttggtcaggacaaccgtctagctataagtgctgcagggtgtgagaaactcctattgctggacgatgtctcttacgaggcattagcacnnnnnnnnnnnnnnnnnnnn

SEQ ID NO: 326 - RNA, 108 nt, Bacillus sp.
  misc_feature 1..108: note = BvCas12b gRNA scaffold + guide sequence; oligonucleotide sequence
  misc_feature 1..88: note = BvCas12b gRNA scaffold
  source 1..108: mol_type = other RNA
gacctatagggtcaatgaatctgtgcgtgtgccataagtaattaaaaattacccaccacaggagcacctgaaaacaggtgcttggcacnnnnnnnnnnnnnnnnnnnn

SEQ ID NO: 327 - RNA, 119 nt, Alicyclobacillus acidiphilus
  misc_feature 1..119: note = AaCas12b gRNA scaffold + guide sequence; oligonucleotide sequence
  misc_feature 1..99: note = AaCas12b gRNA scaffold
  source 1..119: mol_type = other RNA
gtctaaaggacagaatttttcaacgggtgtgccaatggccactttccaggtggcaaagcccgttgaacttctcaaaaagaacgatctgagaagtggcacnnnnnnnnnnnnnnnnnnnn

SEQ ID NO: 328 - protein, 29 aa, synthetic construct
  REGION 1..29: note = synthetic polypeptide sequence
PKKKRKVEGADKRTADGSEFESPKKKRKV

SEQ ID NO: 329 - protein, 23 aa, synthetic construct
  REGION 1..23: note = synthetic peptide sequence
RKSGKIAAIVVKRPRKPKKKRKV

SEQ ID NO: 330 - protein, 8 aa, synthetic construct
  REGION 1..8: note = synthetic peptide sequence
SGGSSGGS

SEQ ID NO: 331 - protein, 1609 aa, synthetic construct
  REGION 1..1609: note = pNMG-B335ABE8.1_Y147T_CP5_NGC PAM_monomer polypeptide sequence
MSEVEFSHEYWMRHALTLAKRARDEREVPVGAVLVLNNRVIGEGWNRAIGLHDPTAHAEIMALRQGGLVMQNYRLIDATLYVTFEPCVMCAGAMIHSRIGRVVFGVRNAKTGAAGSLMDVLHYPGMNHRVEITEGILADECAALLCTFFRMPRQVFNAQKKAQSSTDSGGSSGGSSGSETPGTSESATPESSGGSSGGSEIGKATAKYFFYSNIMNFFKTEITLANGEIRKRPLIETNGETGEIVWDKGRDFATVRKVLSMPQVNIVKKTEVQTGGFSKESILPKRNSDKLIARKKDWDPKKYGGFMQPTVAYSVLVVAKVEKGKSKKLKSVKELLGITIMERSSFEKNPIDFLEAKGYKEVKKDLIIKLPKYSLFELENGRKRMLASAKFLQKGNELALPSKYVNFLYLASHYEKLKGSPEDNEQKQLFVEQHKHYLDEIIEQISEFSKRVILADANLDKVLSAYNKHRDKPIREQAENIIHLFTLTNLGAPRAFKYFDTTIARKEYRSTKEVLDATLIHQSITGLYETRIDLSQLGGDGGSGGSGGSGGSGGSGGSGGMDKKYSIGLAIGTNSVGWAVITDEYKVPSKKFKVLGNTDRHSIKKNLIGALLFDSGETAEATRLKRTARRRYTRRKNRICYLQEIFSNEMAKVDDSFFHRLEESFLVEEDKKHERHPIFGNIVDEVAYHEKYPTIYHLRKKLVDSTDKADLRLIYLALAHMIKFRGHFLIEGDLNPDNSDVDKLFIQLVQTYNQLFEENPINASGVDAKAILSARLSKSRRLENLIAQLPGEKKNGLFGNLIALSLGLTPNFKSNFDLAEDAKLQLSKDTYDDDLDNLLAQIGDQYADLFLAAKNLSDAILLSDILRVNTEITKAPLSASMIKRYDEHHQDLTLLKALVRQQLPEKYKEIFFDQSKNGYAGYIDGGASQEEFYKFIKPILEKMDGTEELLVKLNREDLLRKQRTFDNGSIPHQIHLGELHAILRRQEDFYPFLKDNREKIEKILTFRIPYYVGPLARGNSRFAWMTRKSEETITPWNFEEVVDKGASAQSFIERMTNFDKNLPNEKVLPKHSLLYEYFTVYNELTKVKYVTEGMRKPAFLSGEQKKAIVDLLFKTNRKVTVKQLKEDYFKKIECFDSVEISGVEDRFNASLGTYHDLLKIIKDKDFLDNEENEDILEDIVLTLTLFEDREMIEERLKTYAHLFDDKVMKQLKRRRYTGWGRLSRKLINGIRDKQSGKTILDFLKSDGFANRNFMQLIHDDSLTFKEDIQKAQVSGQGDSLHEHIANLAGSPAIKKGILQTVKVVDELVKVMGRHKPENIVIEMARENQTTQKGQKNSRERMKRIEEGIKELGSQILKEHPVENTQLQNEKLYLYYLQNGRDMYVDQELDINRLSDYDVDHIVPQSFLKDDSIDNKVLTRSDKNRGKSDNVPSEEVVKKMKNYWRQLLNAKLITQRKFDNLTKAERGGLSELDKAGFIKRQLVETRQITKHVAQILDSRMNTKYDENDKLIREVKVITLKSKLVSDFRKDFQFYKVREINNYHHAHDAYLNAVVGTALIKKYPKLESEFVYGDYKVYDVRKMIAKSEQEGADKRTADGSEFESPKKKRKV

SEQ ID NO: 332 - protein, 1807 aa, synthetic construct
  REGION 1..1807: note = pNMG-357_ABE8.14 with NGC PAMCP5 polypeptide sequence
  REGION 1..174: note = MISC_FEATURE - Adenosine deaminase sequence
  REGION 175..198: note = MISC_FEATURE - Linker sequence
  REGION 199..365: note = MISC_FEATURE - Adenosine deaminase sequence
  REGION 366..397: note = MISC_FEATURE - Linker sequence
  REGION 398..738: note = MISC_FEATURE - Sequence derived from Cas9
  REGION 739..759: note = MISC_FEATURE - Linker sequence
  REGION 760..1785: note = MISC_FEATURE - Sequence derived from Cas9
  REGION 1786..1807: note = MISC_FEATURE - Bipartite nuclear localization sequence
MSEVEFSHEYWMRHALTLAKRAWDEREVPVGAVLVHNNRVIGEGWNRPIGRHDPTAHAEIMALRQGGLVMQNYRLIDATLYVTLEPCVMCAGAMIHSRIGRVVFGARDAKTGAAGSLMDVLHHPGMNHRVEITEGILADECAALLSDFFRMRRQEIKAQKKAQSSTDGGSSGGSSGSETPGTSESATPESSGGSSGGSMSEVEFSHEYWMRHALTLAKRARDEREVPVGAVLVLNNRVIGEGWNRAIGLHDPTAHAEIMALRQGGLVMQNYRLIDATLYVTFEPCVMCAGAMIHSRIGRVVFGVRNAKTGAAGSLMDVLHYPGMNHRVEITEGILADECAALLCTFFRMPRQVFNAQKKAQSSTDSGGSSGGSSGSETPGTSESATPESSGGSSGGSEIGKATAKYFFYSNIMNFFKTEITLANGEIRKRPLIETNGETGEIVWDKGRDFATVRKVLSMPQVNIVKKTEVQTGGFSKESILPKRNSDKLIARKKDWDPKKYGGFMQPTVAYSVLVVAKVEKGKSKKLKSVKELLGITIMERSSFEKNPIDFLEAKGYKEVKKDLIIKLPKYSLFELENGRKRMLASAKFLQKGNELALPSKYVNFLYLASHYEKLKGSPEDNEQKQLFVEQHKHYLDEIIEQISEFSKRVILADANLDKVLSAYNKHRDKPIREQAENIIHLFTLTNLGAPRAFKYFDTTIARKEYRSTKEVLDATLIHQSITGLYETRIDLSQLGGDGGSGGSGGSGGSGGSGGSGGMDKKYSIGLAIGTNSVGWAVITDEYKVPSKKFKVLGNTDRHSIKKNLIGALLFDSGETAEATRLKRTARRRYTRRKNRICYLQEIFSNEMAKVDDSFFHRLEESFLVEEDKKHERHPIFGNIVDEVAYHEKYPTIYHLRKKLVDSTDKADLRLIYLALAHMIKFRGHFLIEGDLNPDNSDVDKLFIQLVQTYNQLFEENPINASGVDAKAILSARLSKSRRLENLIAQLPGEKKNGLFGNLIALSLGLTPNFKSNFDLAEDAKLQLSKDTYDDDLDNLLAQIGDQYADLFLAAKNLSDAILLSDILRVNTEITKAPLSASMIKRYDEHHQDLTLLKALVRQQLPEKYKEIFFDQSKNGYAGYIDGGASQEEFYKFIKPILEKMDGTEELLVKLNREDLLRKQRTFDNGSIPHQIHLGELHAILRRQEDFYPFLKDNREKIEKILTFRIPYYVGPLARGNSRFAWMTRKSEETITPWNFEEVVDKGASAQSFIERMTNFDKNLPNEKVLPKHSLLYEYFTVYNELTKVKYVTEGMRKPAFLSGEQKKAIVDLLFKTNRKVTVKQLKEDYFKKIECFDSVEISGVEDRFNASLGTYHDLLKIIKDKDFLDNEENEDILEDIVLTLTLFEDREMIEERLKTYAHLFDDKVMKQLKRRRYTGWGRLSRKLINGIRDKQSGKTILDFLKSDGFANRNFMQLIHDDSLTFKEDIQKAQVSGQGDSLHEHIANLAGSPAIKKGILQTVKVVDELVKVMGRHKPENIVIEMARENQTTQKGQKNSRERMKRIEEGIKELGSQILKEHPVENTQLQNEKLYLYYLQNGRDMYVDQELDINRLSDYDVDHIVPQSFLKDDSIDNKVLTRSDKNRGKSDNVPSEEVVKKMKNYWRQLLNAKLITQRKFDNLTKAERGGLSELDKAGFIKRQLVETRQITKHVAQILDSRMNTKYDENDKLIREVKVITLKSKLVSDFRKDFQFYKVREINNYHHAHDAYLNAVVGTALIKKYPKLESEFVYGDYKVYDVRKMIAKSEQEGADKRTADGSEFESPKKKRKV

SEQ ID NO: 333 - protein, 1588 aa, synthetic construct
  REGION 1..1588: note = ABE8.8-m polypeptide sequence
  REGION 1..167: note = MISC_FEATURE - Adenosine deaminase sequence
  REGION 168..199: note = MISC_FEATURE - Linker sequence
  REGION 200..1566: note = MISC_FEATURE - Sequence derived from Cas9
  REGION 1567..1588: note = MISC_FEATURE - Bipartite nuclear localization sequence
MSEVEFSHEYWMRHALTLAKRARDEREVPVGAVLVLNNRVIGEGWNRAIGLHDPTAHAEIMALRQGGLVMQNYRLIDATLYVTFEPCVMCAGAMIHSRIGRVVFGVRNAKTGAAGSLMDVLHHPGMNHRVEITEGILADECAALLCRFFRMPRRVFNAQKKAQSSTDSGGSSGGSSGSETPGTSESATPESSGGSSGGSDKKYSIGLAIGTNSVGWAVITDEYKVPSKKFKVLGNTDRHSIKKNLIGALLFDSGETAEATRLKRTARRRYTRRKNRICYLQEIFSNEMAKVDDSFFHRLEESFLVEEDKKHERHPIFGNIVDEVAYHEKYPTIYHLRKKLVDSTDKADLRLIYLALAHMIKFRGHFLIEGDLNPDNSDVDKLFIQLVQTYNQLFEENPINASGVDAKAILSARLSKSRRLENLIAQLPGEKKNGLFGNLIALSLGLTPNFKSNFDLAEDAKLQLSKDTYDDDLDNLLAQIGDQYADLFLAAKNLSDAILLSDILRVNTEITKAPLSASMIKRYDEHHQDLTLLKALVRQQLPEKYKEIFFDQSKNGYAGYIDGGASQEEFYKFIKPILEKMDGTEELLVKLNREDLLRKQRTFDNGSIPHQIHLGELHAILRRQEDFYPFLKDNREKIEKILTFRIPYYVGPLARGNSRFAWMTRKSEETITPWNFEEVVDKGASAQSFIERMTNFDKNLPNEKVLPKHSLLYEYFTVYNELTKVKYVTEGMRKPAFLSGEQKKAIVDLLFKTNRKVTVKQLKEDYFKKIECFDSVEISGVEDRFNASLGTYHDLLKIIKDKDFLDNEENEDILEDIVLTLTLFEDREMIEERLKTYAHLFDDKVMKQLKRRRYTGWGRLSRKLINGIRDKQSGKTILDFLKSDGFANRNFMQLIHDDSLTFKEDIQKAQVSGQGDSLHEHIANLAGSPAIKKGILQTVKVVDELVKVMGRHKPENIVIEMARENQTTQKGQKNSRERMKRIEEGIKELGSQILKEHPVENTQLQNEKLYLYYLQNGRDMYVDQELDINRLSDYDVDHIVPQSFLKDDSIDNKVLTRSDKNRGKSDNVPSEEVVKKMKNYWRQLLNAKLITQRKFDNLTKAERGGLSELDKAGFIKRQLVETRQITKHVAQILDSRMNTKYDENDKLIREVKVITLKSKLVSDFRKDFQFYKVREINNYHHAHDAYLNAVVGTALIKKYPKLESEFVYGDYKVYDVRKMIAKSEQEIGKATAKYFFYSNIMNFFKTEITLANGEIRKRPLIETNGETGEIVWDKGRDFATVRKVLSMPQVNIVKKTEVQTGGFSKESILPKRNSDKLIARKKDWDPKKYGGFDSPTVAYSVLVVAKVEKGKSKKLKSVKELLGITIMERSSFEKNPIDFLEAKGYKEVKKDLIIKLPKYSLFELENGRKRMLASAGELQKGNELALPSKYVNFLYLASHYEKLKGSPEDNEQKQLFVEQHKHYLDEIIEQISEFSKRVILADANLDKVLSAYNKHRDKPIREQAENIIHLFTLTNLGAPAAFKYFDTTIDRKRYTSTKEVLDATLIHQSITGLYETRIDLSQLGGDEGADKRTADGSEFESPKKKRKV

SEQ ID NO: 334 - protein, 1786 aa, synthetic construct
  REGION 1..1786: note = ABE8.8-d polypeptide sequence
  REGION 1..167: note = MISC_FEATURE - Adenosine deaminase sequence
  REGION 168..199: note = MISC_FEATURE - Linker sequence
  REGION 200..365: note = MISC_FEATURE - Adenosine deaminase sequence
  REGION 366..397: note = MISC_FEATURE - Linker sequence
  REGION 398..1764: note = MISC_FEATURE - Sequence derived from Cas9
  REGION 1765..1786: note = MISC_FEATURE - Bipartite nuclear localization sequence
MSEVEFSHEYWMRHALTLAKRAWDEREVPVGAVLVHNNRVIGEGWNRPIGRHDPTAHAEIMALRQGGLVMQNYRLIDATLYVTLEPCVMCAGAMIHSRIGRVVFGARDAKTGAAGSLMDVLHHPGMNHRVEITEGILADECAALLSDFFRMRRQEIKAQKKAQSSTDSGGSSGGSSGSETPGTSESATPESSGGSSGGSSEVEFSHEYWMRHALTLAKRARDEREVPVGAVLVLNNRVIGEGWNRAIGLHDPTAHAEIMALRQGGLVMQNYRLIDATLYVTFEPCVMCAGAMIHSRIGRVVFGVRNAKTGAAGSLMDVLHHPGMNHRVEITEGILADECAALLCRFFRMPRRVFNAQKKAQSSTDSGGSSGGSSGSETPGTSESATPESSGGSSGGSDKKYSIGLAIGTNSVGWAVITDEYKVPSKKFKVLGNTDRHSIKKNLIGALLFDSGETAEATRLKRTARRRYTRRKNRICYLQEIFSNEMAKVDDSFFHRLEESFLVEEDKKHERHPIFGNIVDEVAYHEKYPTIYHLRKKLVDSTDKADLRLIYLALAHMIKFRGHFLIEGDLNPDNSDVDKLFIQLVQTYNQLFEENPINASGVDAKAILSARLSKSRRLENLIAQLPGEKKNGLFGNLIALSLGLTPNFKSNFDLAEDAKLQLSKDTYDDDLDNLLAQIGDQYADLFLAAKNLSDAILLSDILRVNTEITKAPLSASMIKRYDEHHQDLTLLKALVRQQLPEKYKEIFFDQSKNGYAGYIDGGASQEEFYKFIKPILEKMDGTEELLVKLNREDLLRKQRTFDNGSIPHQIHLGELHAILRRQEDFYPFLKDNREKIEKILTFRIPYYVGPLARGNSRFAWMTRKSEETITPWNFEEVVDKGASAQSFIERMTNFDKNLPNEKVLPKHSLLYEYFTVYNELTKVKYVTEGMRKPAFLSGEQKKAIVDLLFKTNRKVTVKQLKEDYFKKIECFDSVEISGVEDRFNASLGTYHDLLKIIKDKDFLDNEENEDILEDIVLTLTLFEDREMIEERLKTYAHLFDDKVMKQLKRRRYTGWGRLSRKLINGIRDKQSGKTILDFLKSDGFANRNFMQLIHDDSLTFKEDIQKAQVSGQGDSLHEHIANLAGSPAIKKGILQTVKVVDELVKVMGRHKPENIVIEMARENQTTQKGQKNSRERMKRIEEGIKELGSQILKEHPVENTQLQNEKLYLYYLQNGRDMYVDQELDINRLSDYDVDHIVPQSFLKDDSIDNKVLTRSDKNRGKSDNVPSEEVVKKMKNYWRQLLNAKLITQRKFDNLTKAERGGLSELDKAGFIKRQLVETRQITKHVAQILDSRMNTKYDENDKLIREVKVITLKSKLVSDFRKDFQFYKVREINNYHHAHDAYLNAVVGTALIKKYPKLESEFVYGDYKVYDVRKMIAKSEQEIGKATAKYFFYSNIMNFFKTEITLANGEIRKRPLIETNGETGEIVWDKGRDFATVRKVLSMPQVNIVKKTEVQTGGFSKESILPKRNSDKLIARKKDWDPKKYGGFDSPTVAYSVLVVAKVEKGKSKKLKSVKELLGITIMERSSFEKNPIDFLEAKGYKEVKKDLIIKLPKYSLFELENGRKRMLASAGELQKGNELALPSKYVNFLYLASHYEKLKGSPEDNEQKQLFVEQHKHYLDEIIEQISEFSKRVILADANLDKVLSAYNKHRDKPIREQAENIIHLFTLTNLGAPAAFKYFDTTIDRKRYTSTKEVLDATLIHQSITGLYETRIDLSQLGGDEGADKRTADGSEFESPKKKRKV

SEQ ID NO: 335 - protein, 1588 aa, synthetic construct
  REGION 1..1588: note = ABE8.13-m polypeptide sequence
  REGION 1..167: note = MISC_FEATURE - Adenosine deaminase sequence
  REGION 168..199: note = MISC_FEATURE - Linker sequence
  REGION 200..1566: note = MISC_FEATURE - Sequence derived from Cas9
  REGION 1567..1588: note = MISC_FEATURE - Bipartite nuclear localization sequence
MSEVEFSHEYWMRHALTLAKRARDEREVPVGAVLVLNNRVIGEGWNRAIGLHDPTAHAEIMALRQGGLVMQNYRLYDATLYVTFEPCVMCAGAMIHSRIGRVVFGVRNAKTGAAGSLMDVLHHPGMNHRVEITEGILADECAALLCRFFRMPRRVFNAQKKAQSSTDSGGSSGGSSGSETPGTSESATPESSGGSSGGSDKKYSIGLAIGTNSVGWAVITDEYKVPSKKFKVLGNTDRHSIKKNLIGALLFDSGETAEATRLKRTARRRYTRRKNRICYLQEIFSNEMAKVDDSFFHRLEESFLVEEDKKHERHPIFGNIVDEVAYHEKYPTIYHLRKKLVDSTDKADLRLIYLALAHMIKFRGHFLIEGDLNPDNSDVDKLFIQLVQTYNQLFEENPINASGVDAKAILSARLSKSRRLENLIAQLPGEKKNGLFGNLIALSLGLTPNFKSNFDLAEDAKLQLSKDTYDDDLDNLLAQIGDQYADLFLAAKNLSDAILLSDILRVNTEITKAPLSASMIKRYDEHHQDLTLLKALVRQQLPEKYKEIFFDQSKNGYAGYIDGGASQEEFYKFIKPILEKMDGTEELLVKLNREDLLRKQRTFDNGSIPHQIHLGELHAILRRQEDFYPFLKDNREKIEKILTFRIPYYVGPLARGNSRFAWMTRKSEETITPWNFEEVVDKGASAQSFIERMTNFDKNLPNEKVLPKHSLLYEYFTVYNELTKVKYVTEGMRKPAFLSGEQKKAIVDLLFKTNRKVTVKQLKEDYFKKIECFDSVEISGVEDRFNASLGTYHDLLKIIKDKDFLDNEENEDILEDIVLTLTLFEDREMIEERLKTYAHLFDDKVMKQLKRRRYTGWGRLSRKLINGIRDKQSGKTILDFLKSDGFANRNFMQLIHDDSLTFKEDIQKAQVSGQGDSLHEHIANLAGSPAIKKGILQTVKVVDELVKVMGRHKPENIVIEMARENQTTQKGQKNSRERMKRIEEGIKELGSQILKEHPVENTQLQNEKLYLYYLQNGRDMYVDQELDINRLSDYDVDHIVPQSFLKDDSIDNKVLTRSDKNRGKSDNVPSEEVVKKMKNYWRQLLNAKLITQRKFDNLTKAERGGLSELDKAGFIKRQLVETRQITKHVAQILDSRMNTKYDENDKLIREVKVITLKSKLVSDFRKDFQFYKVREINNYHHAHDAYLNAVVGTALIKKYPKLESEFVYGDYKVYDVRKMIAKSEQEIGKATAKYFFYSNIMNFFKTEITLANGEIRKRPLIETNGETGEIVWDKGRDFATVRKVLSMPQVNIVKKTEVQTGGFSKESILPKRNSDKLIARKKDWDPKKYGGFDSPTVAYSVLVVAKVEKGKSKKLKSVKELLGITIMERSSFEKNPIDFLEAKGYKEVKKDLIIKLPKYSLFELENGRKRMLASAGELQKGNELALPSKYVNFLYLASHYEKLKGSPEDNEQKQLFVEQHKHYLDEIIEQISEFSKRVILADANLDKVLSAYNKHRDKPIREQAENIIHLFTLTNLGAPAAFKYFDTTIDRKRYTSTKEVLDATLIHQSITGLYETRIDLSQLGGDEGADKRTADGSEFESPKKKRKV

SEQ ID NO: 336 - protein, 1786 aa, synthetic construct
  REGION 1..1786: note = ABE8.13-d polypeptide sequence
  REGION 1..167: note = MISC_FEATURE - Adenosine deaminase sequence
  REGION 168..199: note = MISC_FEATURE - Linker sequence
  REGION 200..365: note = MISC_FEATURE - Adenosine deaminase sequence
  REGION 366..397: note = MISC_FEATURE - Linker sequence
  REGION 398..1764: note = MISC_FEATURE - Sequence derived from Cas9
  REGION 1765..1786: note = MISC_FEATURE - Bipartite nuclear localization sequence
MSEVEFSHEYWMRHALTLAKRAWDEREVPVGAVLVHNNRVIGEGWNRPIGRHDPTAHAEIMALRQGGLVMQNYRLIDATLYVTLEPCVMCAGAMIHSRIGRVVFGARDAKTGAAGSLMDVLHHPGMNHRVEITEGILADECAALLSDFFRMRRQEIKAQKKAQSSTDSGGSSGGSSGSETPGTSESATPESSGGSSGGSSEVEFSHEYWMRHALTLAKRARDEREVPVGAVLVLNNRVIGEGWNRAIGLHDPTAHAEIMALRQGGLVMQNYRLYDATLYVTFEPCVMCAGAMIHSRIGRVVFGVRNAKTGAAGSLMDVLHHPGMNHRVEITEGILADECAALLCRFFRMPRRVFNAQKKAQSSTDSGGSSGGSSGSETPGTSESATPESSGGSSGGSDKKYSIGLAIGTNSVGWAVITDEYKVPSKKFKVLGNTDRHSIKKNLIGALLFDSGETAEATRLKRTARRRYTRRKNRICYLQEIFSNEMAKVDDSFFHRLEESFLVEEDKKHERHPIFGNIVDEVAYHEKYPTIYHLRKKLVDSTDKADLRLIYLALAHMIKFRGHFLIEGDLNPDNSDVDKLFIQLVQTYNQLFEENPINASGVDAKAILSARLSKSRRLENLIAQLPGEKKNGLFGNLIALSLGLTPNFKSNFDLAEDAKLQLSKDTYDDDLDNLLAQIGDQYADLFLAAKNLSDAILLSDILRVNTEITKAPLSASMIKRYDEHHQDLTLLKALVRQQLPEKYKEIFFDQSKNGYAGYIDGGASQEEFYKFIKPILEKMDGTEELLVKLNREDLLRKQRTFDNGSIPHQIHLGELHAILRRQEDFYPFLKDNREKIEKILTFRIPYYVGPLARGNSRFAWMTRKSEETITPWNFEEVVDKGASAQSFIERMTNFDKNLPNEKVLPKHSLLYEYFTVYNELTKVKYVTEGMRKPAFLSGEQKKAIVDLLFKTNRKVTVKQLKEDYFKKIECFDSVEISGVEDRFNASLGTYHDLLKIIKDKDFLDNEENEDILEDIVLTLTLFEDREMIEERLKTYAHLFDDKVMKQLKRRRYTGWGRLSRKLINGIRDKQSGKTILDFLKSDGFANRNFMQLIHDDSLTFKEDIQKAQVSGQGDSLHEHIANLAGSPAIKKGILQTVKVVDELVKVMGRHKPENIVIEMARENQTTQKGQKNSRERMKRIEEGIKELGSQILKEHPVENTQLQNEKLYLYYLQNGRDMYVDQELDINRLSDYDVDHIVPQSFLKDDSIDNKVLTRSDKNRGKSDNVPSEEVVKKMKNYWRQLLNAKLITQRKFDNLTKAERGGLSELDKAGFIKRQLVETRQITKHVAQILDSRMNTKYDENDKLIREVKVITLKSKLVSDFRKDFQFYKVREINNYHHAHDAYLNAVVGTALIKKYPKLESEFVYGDYKVYDVRKMIAKSEQEIGKATAKYFFYSNIMNFFKTEITLANGEIRKRPLIETNGETGEIVWDKGRDFATVRKVLSMPQVNIVKKTEVQTGGFSKESILPKRNSDKLIARKKDWDPKKYGGFDSPTVAYSVLVVAKVEKGKSKKLKSVKELLGITIMERSSFEKNPIDFLEAKGYKEVKKDLIIKLPKYSLFELENGRKRMLASAGELQKGNELALPSKYVNFLYLASHYEKLKGSPEDNEQKQLFVEQHKHYLDEIIEQISEFSKRVILADANLDKVLSAYNKHRDKPIREQAENIIHLFTLTNLGAPAAFKYFDTTIDRKRYTSTKEVLDATLIHQSITGLYETRIDLSQLGGDEGADKRTADGSEFESPKKKRKV

SEQ ID NO: 337 - protein, 1588 aa, synthetic construct
  REGION 1..1588: note = ABE8.17-m polypeptide sequence
  REGION 1..167: note = MISC_FEATURE - Adenosine deaminase sequence
  REGION 168..199: note = MISC_FEATURE - Linker sequence
  REGION 200..1566: note = MISC_FEATURE - Sequence derived from Cas9
  REGION 1567..1588: note = MISC_FEATURE - Bipartite nuclear localization sequence
MSEVEFSHEYWMRHALTLAKRARDEREVPVGAVLVLNNRVIGEGWNRAIGLHDPTAHAEIMALRQGGLVMQNYRLIDATLYSTFEPCVMCAGAMIHSRIGRVVFGVRNAKTGAAGSLMDVLHYPGMNHRVEITEGILADECAALLCYFFRMPRRVFNAQKKAQSSTDSGGSSGGSSGSETPGTSESATPESSGGSSGGSDKKYSIGLAIGTNSVGWAVITDEYKVPSKKFKVLGNTDRHSIKKNLIGALLFDSGETAEATRLKRTARRRYTRRKNRICYLQEIFSNEMAKVDDSFFHRLEESFLVEEDKKHERHPIFGNIVDEVAYHEKYPTIYHLRKKLVDSTDKADLRLIYLALAHMIKFRGHFLIEGDLNPDNSDVDKLFIQLVQTYNQLFEENPINASGVDAKAILSARLSKSRRLENLIAQLPGEKKNGLFGNLIALSLGLTPNFKSNFDLAEDAKLQLSKDTYDDDLDNLLAQIGDQYADLFLAAKNLSDAILLSDILRVNTEITKAPLSASMIKRYDEHHQDLTLLKALVRQQLPEKYKEIFFDQSKNGYAGYIDGGASQEEFYKFIKPILEKMDGTEELLVKLNREDLLRKQRTFDNGSIPHQIHLGELHAILRRQEDFYPFLKDNREKIEKILTFRIPYYVGPLARGNSRFAWMTRKSEETITPWNFEEVVDKGASAQSFIERMTNFDKNLPNEKVLPKHSLLYEYFTVYNELTKVKYVTEGMRKPAFLSGEQKKAIVDLLFKTNRKVTVKQLKEDYFKKIECFDSVEISGVEDRFNASLGTYHDLLKIIKDKDFLDNEENEDILEDIVLTLTLFEDREMIEERLKTYAHLFDDKVMKQLKRRRYTGWGRLSRKLINGIRDKQSGKTILDFLKSDGFANRNFMQLIHDDSLTFKEDIQKAQVSGQGDSLHEHIANLAGSPAIKKGILQTVKVVDELVKVMGRHKPENIVIEMARENQTTQKGQKNSRERMKRIEEGIKELGSQILKEHPVENTQLQNEKLYLYYLQNGRDMYVDQELDINRLSDYDVDHIVPQSFLKDDSIDNKVLTRSDKNRGKSDNVPSEEVVKKMKNYWRQLLNAKLITQRKFDNLTKAERGGLSELDKAGFIKRQLVETRQITKHVAQILDSRMNTKYDENDKLIREVKVITLKSKLVSDFRKDFQFYKVREINNYHHAHDAYLNAVVGTALIKKYPKLESEFVYGDYKVYDVRKMIAKSEQEIGKATAKYFFYSNIMNFFKTEITLANGEIRKRPLIETNGETGEIVWDKGRDFATVRKVLSMPQVNIVKKTEVQTGGFSKESILPKRNSDKLIARKKDWDPKKYGGFDSPTVAYSVLVVAKVEKGKSKKLKSVKELLGITIMERSSFEKNPIDFLEAKGYKEVKKDLIIKLPKYSLFELENGRKRMLASAGELQKGNELALPSKYVNFLYLASHYEKLKGSPEDNEQKQLFVEQHKHYLDEIIEQISEFSKRVILADANLDKVLSAYNKHRDKPIREQAENIIHLFTLTNLGAPAAFKYFDTTIDRKRYTSTKEVLDATLIHQSITGLYETRIDLSQLGGDEGADKRTADGSEFESPKKKRKV

SEQ ID NO: 338 - protein, 1786 aa, synthetic construct
  REGION 1..1786: note = ABE8.17-d polypeptide sequence
  REGION 1..167: note = MISC_FEATURE - Adenosine deaminase sequence
  REGION 168..199: note = MISC_FEATURE - Linker sequence
  REGION 200..365: note = MISC_FEATURE - Adenosine deaminase sequence
  REGION 366..397: note = MISC_FEATURE - Linker sequence
  REGION 398..1764: note = MISC_FEATURE - Sequence derived from Cas9
  REGION 1765..1786: note = MISC_FEATURE - Bipartite nuclear localization sequence
MSEVEFSHEYWMRHALTLAKRAWDEREVPVGAVLVHNNRVIGEGWNRPIGRHDPTAHAEIMALRQGGLVMQNYRLIDATLYVTLEPCVMCAGAMIHSRIGRVVFGARDAKTGAAGSLMDVLHHPGMNHRVEITEGILADECAALLSDFFRMRRQEIKAQKKAQSSTDSGGSSGGSSGSETPGTSESATPESSGGSSGGSSEVEFSHEYWMRHALTLAKRARDEREVPVGAVLVLNNRVIGEGWNRAIGLHDPTAHAEIMALRQGGLVMQNYRLIDATLYSTFEPCVMCAGAMIHSRIGRVVFGVRNAKTGAAGSLMDVLHYPGMNHRVEITEGILADECAALLCYFFRMPRRVFNAQKKAQSSTDSGGSSGGSSGSETPGTSESATPESSGGSSGGSDKKYSIGLAIGTNSVGWAVITDEYKVPSKKFKVLGNTDRHSIKKNLIGALLFDSGETAEATRLKRTARRRYTRRKNRICYLQEIFSNEMAKVDDSFFHRLEESFLVEEDKKHERHPIFGNIVDEVAYHEKYPTIYHLRKKLVDSTDKADLRLIYLALAHMIKFRGHFLIEGDLNPDNSDVDKLFIQLVQTYNQLFEENPINASGVDAKAILSARLSKSRRLENLIAQLPGEKKNGLFGNLIALSLGLTPNFKSNFDLAEDAKLQLSKDTYDDDLDNLLAQIGDQYADLFLAAKNLSDAILLSDILRVNTEITKAPLSASMIKRYDEHHQDLTLLKALVRQQLPEKYKEIFFDQSKNGYAGYIDGGASQEEFYKFIKPILEKMDGTEELLVKLNREDLLRKQRTFDNGSIPHQIHLGELHAILRRQEDFYPFLKDNREKIEKILTFRIPYYVGPLARGNSRFAWMTRKSEETITPWNFEEVVDKGASAQSFIERMTNFDKNLPNEKVLPKHSLLYEYFTVYNELTKVKYVTEGMRKPAFLSGEQKKAIVDLLFKTNRKVTVKQLKEDYFKKIECFDSVEISGVEDRFNASLGTYHDLLKIIKDKDFLDNEENEDILEDIVLTLTLFEDREMIEERLKTYAHLFDDKVMKQLKRRRYTGWGRLSRKLINGIRDKQSGKTILDFLKSDGFANRNFMQLIHDDSLTFKEDIQKAQVSGQGDSLHEHIANLAGSPAIKKGILQTVKVVDELVKVMGRHKPENIVIEMARENQTTQKGQKNSRERMKRIEEGIKELGSQILKEHPVENTQLQNEKLYLYYLQNGRDMYVDQELDINRLSDYDVDHIVPQSFLKDDSIDNKVLTRSDKNRGKSDNVPSEEVVKKMKNYWRQLLNAKLITQRKFDNLTKAERGGLSELDKAGFIKRQLVETRQITKHVAQILDSRMNTKYDENDKLIREVKVITLKSKLVSDFRKDFQFYKVREINNYHHAHDAYLNAVVGTALIKKYPKLESEFVYGDYKVYDVRKMIAKSEQEIGKATAKYFFYSNIMNFFKTEITLANGEIRKRPLIETNGETGEIVWDKGRDFATVRKVLSMPQVNIVKKTEVQTGGFSKESILPKRNSDKLIARKKDWDPKKYGGFDSPTVAYSVLVVAKVEKGKSKKLKSVKELLGITIMERSSFEKNPIDFLEAKGYKEVKKDLIIKLPKYSLFELENGRKRMLASAGELQKGNELALPSKYVNFLYLASHYEKLKGSPEDNEQKQLFVEQHKHYLDEIIEQISEFSKRVILADANLDKVLSAYNKHRDKPIREQAENIIHLFTLTNLGAPAAFKYFDTTIDRKRYTSTKEVLDATLIHQSITGLYETRIDLSQLGGDEGADKRTADGSEFESPKKKRKV

SEQ ID NO: 339 - protein, 1588 aa, synthetic construct
  REGION 1..1588: note = ABE8.20-m polypeptide sequence
  REGION 1..167: note = MISC_FEATURE - Adenosine deaminase sequence
  REGION 168..199: note = MISC_FEATURE - Linker sequence
  REGION 200..1566: note = MISC_FEATURE - Sequence derived from Cas9
  REGION 1567..1588: note = MISC_FEATURE - Bipartite nuclear localization sequence
MSEVEFSHEYWMRHALTLAKRARDEREVPVGAVLVLNNRVIGEGWNRAIGLHDPTAHAEIMALRQGGLVMQNYRLYDATLYSTFEPCVMCAGAMIHSRIGRVVFGVRNAKTGAAGSLMDVLHHPGMNHRVEITEGILADECAALLCRFFRMPRRVFNAQKKAQSSTDSGGSSGGSSGSETPGTSESATPESSGGSSGGSDKKYSIGLAIGTNSVGWAVITDEYKVPSKKFKVLGNTDRHSIKKNLIGALLFDSGETAEATRLKRTARRRYTRRKNRICYLQEIFSNEMAKVDDSFFHRLEESFLVEEDKKHERHPIFGNIVDEVAYHEKYPTIYHLRKKLVDSTDKADLRLIYLALAHMIKFRGHFLIEGDLNPDNSDVDKLFIQLVQTYNQLFEENPINASGVDAKAILSARLSKSRRLENLIAQLPGEKKNGLFGNLIALSLGLTPNFKSNFDLAEDAKLQLSKDTYDDDLDNLLAQIGDQYADLFLAAKNLSDAILLSDILRVNTEITKAPLSASMIKRYDEHHQDLTLLKALVRQQLPEKYKEIFFDQSKNGYAGYIDGGASQEEFYKFIKPILEKMDGTEELLVKLNREDLLRKQRTFDNGSIPHQIHLGELHAILRRQEDFYPFLKDNREKIEKILTFRIPYYVGPLARGNSRFAWMTRKSEETITPWNFEEVVDKGASAQSFIERMTNFDKNLPNEKVLPKHSLLYEYFTVYNELTKVKYVTEGMRKPAFLSGEQKKAIVDLLFKTNRKVTVKQLKEDYFKKIECFDSVEISGVEDRFNASLGTYHDLLKIIKDKDFLDNEENEDILEDIVLTLTLFEDREMIEERLKTYAHLFDDKVMKQLKRRRYTGWGRLSRKLINGIRDKQSGKTILDFLKSDGFANRNFMQLIHDDSLTFKEDIQKAQVSGQGDSLHEHIANLAGSPAIKKGILQTVKVVDELVKVMGRHKPENIVIEMARENQTTQKGQKNSRERMKRIEEGIKELGSQILKEHPVENTQLQNEKLYLYYLQNGRDMYVDQELDINRLSDYDVDHIVPQSFLKDDSIDNKVLTRSDKNRGKSDNVPSEEVVKKMKNYWRQLLNAKLITQRKFDNLTKAERGGLSELDKAGFIKRQLVETRQITKHVAQILDSRMNTKYDENDKLIREVKVITLKSKLVSDFRKDFQFYKVREINNYHHAHDAYLNAVVGTALIKKYPKLESEFVYGDYKVYDVRKMIAKSEQEIGKATAKYFFYSNIMNFFKTEITLANGEIRKRPLIETNGETGEIVWDKGRDFATVRKVLSMPQVNIVKKTEVQTGGFSKESILPKRNSDKLIARKKDWDPKKYGGFDSPTVAYSVLVVAKVEKGKSKKLKSVKELLGITIMERSSFEKNPIDFLEAKGYKEVKKDLIIKLPKYSLFELENGRKRMLASAGELQKGNELALPSKYVNFLYLASHYEKLKGSPEDNEQKQLFVEQHKHYLDEIIEQISEFSKRVILADANLDKVLSAYNKHRDKPIREQAENIIHLFTLTNLGAPAAFKYFDTTIDRKRYTSTKEVLDATLIHQSITGLYETRIDLSQLGGDEGADKRTADGSEFESPKKKRKV

SEQ ID NO: 340 - protein, 1786 aa, synthetic construct
  REGION 1..1786: note = ABE8.20-d polypeptide sequence
  REGION 1..167: note = MISC_FEATURE - Adenosine deaminase sequence
  REGION 168..199: note = MISC_FEATURE - Linker sequence
  REGION 200..365: note = MISC_FEATURE - Adenosine deaminase sequence
  REGION 366..397: note = MISC_FEATURE - Linker sequence
  REGION 398..1764: note = MISC_FEATURE - Sequence derived from Cas9
  REGION 1765..1786: note = MISC_FEATURE - Bipartite nuclear localization sequence
MSEVEFSHEYWMRHALTLAKRAWDEREVPVGAVLVHNNRVIGEGWNRPIGRHDPTAHAEIMALRQGGLVMQNYRLIDATLYVTLEPCVMCAGAMIHSRIGRVVFGARDAKTGAAGSLMDVLHHPGMNHRVEITEGILADECAALLSDFFRMRRQEIKAQKKAQSSTDSGGSSGGSSGSETPGTSESATPESSGGSSGGSSEVEFSHEYWMRHALTLAKRARDEREVPVGAVLVLNNRVIGEGWNRAIGLHDPTAHAEIMALRQGGLVMQNYRLYDATLYSTFEPCVMCAGAMIHSRIGRVVFGVRNAKTGAAGSLMDVLHHPGMNHRVEITEGILADECAALLCRFFRMPRRVFNAQKKAQSSTDSGGSSGGSSGSETPGTSESATPESSGGSSGGSDKKYSIGLAIGTNSVGWAVITDEYKVPSKKFKVLGNTDRHSIKKNLIGALLFDSGETAEATRLKRTARRRYTRRKNRICYLQEIFSNEMAKVDDSFFHRLEESFLVEEDKKHERHPIFGNIVDEVAYHEKYPTIYHLRKKLVDSTDKADLRLIYLALAHMIKFRGHFLIEGDLNPDNSDVDKLFIQLVQTYNQLFEENPINASGVDAKAILSARLSKSRRLENLIAQLPGEKKNGLFGNLIALSLGLTPNFKSNFDLAEDAKLQLSKDTYDDDLDNLLAQIGDQYADLFLAAKNLSDAILLSDILRVNTEITKAPLSASMIKRYDEHHQDLTLLKALVRQQLPEKYKEIFFDQSKNGYAGYIDGGASQEEFYKFIKPILEKMDGTEELLVKLNREDLLRKQRTFDNGSIPHQIHLGELHAILRRQEDFYPFLKDNREKIEKILTFRIPYYVGPLARGNSRFAWMTRKSEETITPWNFEEVVDKGASAQSFIERMTNFDKNLPNEKVLPKHSLLYEYFTVYNELTKVKYVTEGMRKPAFLSGEQKKAIVDLLFKTNRKVTVKQLKEDYFKKIECFDSVEISGVEDRFNASLGTYHDLLKIIKDKDFLDNEENEDILEDIVLTLTLFEDREMIEERLKTYAHLFDDKVMKQLKRRRYTGWGRLSRKLINGIRDKQSGKTILDFLKSDGFANRNFMQLIHDDSLTFKEDIQKAQVSGQGDSLHEHIANLAGSPAIKKGILQTVKVVDELVKVMGRHKPENIVIEMARENQTTQKGQKNSRERMKRIEEGIKELGSQILKEHPVENTQLQNEKLYLYYLQNGRDMYVDQELDINRLSDYDVDHIVPQSFLKDDSIDNKVLTRSDKNRGKSDNVPSEEVVKKMKNYWRQLLNAKLITQRKFDNLTKAERGGLSELDKAGFIKRQLVETRQITKHVAQILDSRMNTKYDENDKLIREVKVITLKSKLVSDFRKDFQFYKVREINNYHHAHDAYLNAVVGTALIKKYPKLESEFVYGDYKVYDVRKMIAKSEQEIGKATAKYFFYSNIMNFFKTEITLANGEIRKRPLIETNGETGEIVWDKGRDFATVRKVLSMPQVNIVKKTEVQTGGFSKESILPKRNSDKLIARKKDWDPKKYGGFDSPTVAYSVLVVAKVEKGKSKKLKSVKELLGITIMERSSFEKNPIDFLEAKGYKEVKKDLIIKLPKYSLFELENGRKRMLASAGELQKGNELALPSKYVNFLYLASHYEKLKGSPEDNEQKQLFVEQHKHYLDEIIEQISEFSKRVILADANLDKVLSAYNKHRDKPIREQAENIIHLFTLTNLGAPAAFKYFDTTIDRKRYTSTKEVLDATLIHQSITGLYETRIDLSQLGGDEGADKRTADGSEFESPKKKRKV

SEQ ID NO: 341 - protein, 1588 aa, synthetic construct
  REGION 1..1588: note = 01. monoABE8.1_bpNLS + Y147T polypeptide sequence
MSEVEFSHEYWMRHALTLAKRARDEREVPVGAVLVLNNRVIGEGWNRAIGLHDPTAHAEIMALRQGGLVMQNYRLIDATLYVTFEPCVMCAGAMIHSRIGRVVFGVRNAKTGAAGSLMDVLHYPGMNHRVEITEGILADECAALLCTFFRMPRQVFNAQKKAQSSTDSGGSSGGSSGSETPGTSESATPESSGGSSGGSDKKYSIGLAIGTNSVGWAVITDEYKVPSKKFKVLGNTDRHSIKKNLIGALLFDSGETAEATRLKRTARRRYTRRKNRICYLQEIFSNEMAKVDDSFFHRLEESFLVEEDKKHERHPIFGNIVDEVAYHEKYPTIYHLRKKLVDSTDKADLRLIYLALAHMIKFRGHFLIEGDLNPDNSDVDKLFIQLVQTYNQLFEENPINASGVDAKAILSARLSKSRRLENLIAQLPGEKKNGLFGNLIALSLGLTPNFKSNFDLAEDAKLQLSKDTYDDDLDNLLAQIGDQYADLFLAAKNLSDAILLSDILRVNTEITKAPLSASMIKRYDEHHQDLTLLKALVRQQLPEKYKEIFFDQSKNGYAGYIDGGASQEEFYKFIKPILEKMDGTEELLVKLNREDLLRKQRTFDNGSIPHQIHLGELHAILRRQEDFYPFLKDNREKIEKILTFRIPYYVGPLARGNSRFAWMTRKSEETITPWNFEEVVDKGASAQSFIERMTNFDKNLPNEKVLPKHSLLYEYFTVYNELTKVKYVTEGMRKPAFLSGEQKKAIVDLLFKTNRKVTVKQLKEDYFKKIECFDSVEISGVEDRFNASLGTYHDLLKIIKDKDFLDNEENEDILEDIVLTLTLFEDREMIEERLKTYAHLFDDKVMKQLKRRRYTGWGRLSRKLINGIRDKQSGKTILDFLKSDGFANRNFMQLIHDDSLTFKEDIQKAQVSGQGDSLHEHIANLAGSPAIKKGILQTVKVVDELVKVMGRHKPENIVIEMARENQTTQKGQKNSRERMKRIEEGIKELGSQILKEHPVENTQLQNEKLYLYYLQNGRDMYVDQELDINRLSDYDVDHIVPQSFLKDDSIDNKVLTRSDKNRGKSDNVPSEEVVKKMKNYWRQLLNAKLITQRKFDNLTKAERGGLSELDKAGFIKRQLVETRQITKHVAQILDSRMNTKYDENDKLIREVKVITLKSKLVSDFRKDFQFYKVREINNYHHAHDAYLNAVVGTALIKKYPKLESEFVYGDYKVYDVRKMIAKSEQEIGKATAKYFFYSNIMNFFKTEITLANGEIRKRPLIETNGETGEIVWDKGRDFATVRKVLSMPQVNIVKKTEVQTGGFSKESILPKRNSDKLIARKKDWDPKKYGGFVSPTVAYSVLVVAKVEKGKSKKLKSVKELLGITIMERSSFEKNPIDFLEAKGYKEVKKDLIIKLPKYSLFELENGRKRMLASARELQKGNELALPSKYVNFLYLASHYEKLKGSPEDNEQKQLFVEQHKHYLDEIIEQISEFSKRVILADANLDKVLSAYNKHRDKPIREQAENIIHLFTLTNLGAPAAFKYFDTTIDRKQYRSTKEVLDATLIHQSITGLYETRIDLSQLGGDEGADKRTADGSEFESPKKKRKV

SEQ ID NO: 342 - protein, 1588 aa, synthetic construct
  REGION 1..1588: note = 02. monoABE8.1_bpNLS + Y147R polypeptide sequence
MSEVEFSHEYWMRHALTLAKRARDEREVPVGAVLVLNNRVIGEGWNRAIGLHDPTAHAEIMALRQGGLVMQNYRLIDATLYVTFEPCVMCAGAMIHSRIGRVVFGVRNAKTGAAGSLMDVLHYPGMNHRVEITEGILADECAALLCRFFRMPRQVFNAQKKAQSSTDSGGSSGGSSGSETPGTSESATPESSGGSSGGSDKKYSIGLAIGTNSVGWAVITDEYKVPSKKFKVLGNTDRHSIKKNLIGALLFDSGETAEATRLKRTARRRYTRRKNRICYLQEIFSNEMAKVDDSFFHRLEESFLVEEDKKHERHPIFGNIVDEVAYHEKYPTIYHLRKKLVDSTDKADLRLIYLALAHMIKFRGHFLIEGDLNPDNSDVDKLFIQLVQTYNQLFEENPINASGVDAKAILSARLSKSRRLENLIAQLPGEKKNGLFGNLIALSLGLTPNFKSNFDLAEDAKLQLSKDTYDDDLDNLLAQIGDQYADLFLAAKNLSDAILLSDILRVNTEITKAPLSASMIKRYDEHHQDLTLLKALVRQQLPEKYKEIFFDQSKNGYAGYIDGGASQEEFYKFIKPILEKMDGTEELLVKLNREDLLRKQRTFDNGSIPHQIHLGELHAILRRQEDFYPFLKDNREKIEKILTFRIPYYVGPLARGNSRFAWMTRKSEETITPWNFEEVVDKGASAQSFIERMTNFDKNLPNEKVLPKHSLLYEYFTVYNELTKVKYVTEGMRKPAFLSGEQKKAIVDLLFKTNRKVTVKQLKEDYFKKIECFDSVEISGVEDRFNASLGTYHDLLKIIKDKDFLDNEENEDILEDIVLTLTLFEDREMIEERLKTYAHLFDDKVMKQLKRRRYTGWGRLSRKLINGIRDKQSGKTILDFLKSDGFANRNFMQLIHDDSLTFKEDIQKAQVSGQGDSLHEHIANLAGSPAIKKGILQTVKVVDELVKVMGRHKPENIVIEMARENQTTQKGQKNSRERMKRIEEGIKELGSQILKEHPVENTQLQNEKLYLYYLQNGRDMYVDQELDINRLSDYDVDHIVPQSFLKDDSIDNKVLTRSDKNRGKSDNVPSEEVVKKMKNYWRQLLNAKLITQRKFDNLTKAERGGLSELDKAGFIKRQLVETRQITKHVAQILDSRMNTKYDENDKLIREVKVITLKSKLVSDFRKDFQFYKVREINNYHHAHDAYLNAVVGTALIKKYPKLESEFVYGDYKVYDVRKMIAKSEQEIGKATAKYFFYSNIMNFFKTEITLANGEIRKRPLIETNGETGEIVWDKGRDFATVRKVLSMPQVNIVKKTEVQTGGFSKESILPKRNSDKLIARKKDWDPKKYGGFVSPTVAYSVLVVAKVEKGKSKKLKSVKELLGITIMERSSFEKNPIDFLEAKGYKEVKKDLIIKLPKYSLFELENGRKRMLASARELQKGNELALPSKYVNFLYLASHYEKLKGSPEDNEQKQLFVEQHKHYLDEIIEQISEFSKRVILADANLDKVLSAYNKHRDKPIREQAENIIHLFTLTNLGAPAAFKYFDTTIDRKQYRSTKEVLDATLIHQSITGLYETRIDLSQLGGDEGADKRTADGSEFESPKKKRKV

SEQ ID NO: 343 - protein, 1588 aa, synthetic construct
  REGION 1..1588: note = 03. monoABE8.1_bpNLS + Q154S polypeptide sequence
MSEVEFSHEYWMRHALTLAKRARDEREVPVGAVLVLNNRVIGEGWNRAIGLHDPTAHAEIMALRQGGLVMQNYRLIDATLYVTFEPCVMCAGAMIHSRIGRVVFGVRNAKTGAAGSLMDVLHYPGMNHRVEITEGILADECAALLCYFFRMPRSVFNAQKKAQSSTDSGGSSGGSSGSETPGTSESATPESSGGSSGGSDKKYSIGLAIGTNSVGWAVITDEYKVPSKKFKVLGNTDRHSIKKNLIGALLFDSGETAEATRLKRTARRRYTRRKNRICYLQEIFSNEMAKVDDSFFHRLEESFLVEEDKKHERHPIFGNIVDEVAYHEKYPTIYHLRKKLVDSTDKADLRLIYLALAHMIKFRGHFLIEGDLNPDNSDVDKLFIQLVQTYNQLFEENPINASGVDAKAILSARLSKSRRLENLIAQLPGEKKNGLFGNLIALSLGLTPNFKSNFDLAEDAKLQLSKDTYDDDLDNLLAQIGDQYADLFLAAKNLSDAILLSDILRVNTEITKAPLSASMIKRYDEHHQDLTLLKALVRQQLPEKYKEIFFDQSKNGYAGYIDGGASQEEFYKFIKPILEKMDGTEELLVKLNREDLLRKQRTFDNGSIPHQIHLGELHAILRRQEDFYPFLKDNREKIEKILTFRIPYYVGPLARGNSRFAWMTRKSEETITPWNFEEVVDKGASAQSFIERMTNFDKNLPNEKVLPKHSLLYEYFTVYNELTKVKYVTEGMRKPAFLSGEQKKAIVDLLFKTNRKVTVKQLKEDYFKKIECFDSVEISGVEDRFNASLGTYHDLLKIIKDKDFLDNEENEDILEDIVLTLTLFEDREMIEERLKTYAHLFDDKVMKQLKRRRYTGWGRLSRKLINGIRDKQSGKTILDFLKSDGFANRNFMQLIHDDSLTFKEDIQKAQVSGQGDSLHEHIANLAGSPAIKKGILQTVKVVDELVKVMGRHKPENIVIEMARENQTTQKGQKNSRERMKRIEEGIKELGSQILKEHPVENTQLQNEKLYLYYLQNGRDMYVDQELDINRLSDYDVDHIVPQSFLKDDSIDNKVLTRSDKNRGKSDNVPSEEVVKKMKNYWRQLLNAKLITQRKFDNLTKAERGGLSELDKAGFIKRQLVETRQITKHVAQILDSRMNTKYDENDKLIREVKVITLKSKLVSDFRKDFQFYKVREINNYHHAHDAYLNAVVGTALIKKYPKLESEFVYGDYKVYDVRKMIAKSEQEIGKATAKYFFYSNIMNFFKTEITLANGEIRKRPLIETNGETGEIVWDKGRDFATVRKVLSMPQVNIVKKTEVQTGGFSKESILPKRNSDKLIARKKDWDPKKYGGFVSPTVAYSVLVVAKVEKGKSKKLKSVKELLGITIMERSSFEKNPIDFLEAKGYKEVKKDLIIKLPKYSLFELENGRKRMLASARELQKGNELALPSKYVNFLYLASHYEKLKGSPEDNEQKQLFVEQHKHYLDEIIEQISEFSKRVILADANLDKVLSAYNKHRDKPIREQAENIIHLFTLTNLGAPAAFKYFDTTIDRKQYRSTKEVLDATLIHQSITGLYETRIDLSQLGGDEGADKRTADGSEFESPKKKRKV

SEQ ID NO: 344 - protein, 1588 aa, synthetic construct
  REGION 1..1588: note = 04. monoABE8.1_bpNLS + Y123H polypeptide sequence
MSEVEFSHEYWMRHALTLAKRARDEREVPVGAVLVLNNRVIGEGWNRAIGLHDPTAHAEIMALRQGGLVMQNYRLIDATLYVTFEPCVMCAGAMIHSRIGRVVFGVRNAKTGAAGSLMDVLHHPGMNHRVEITEGILADECAALLCYFFRMPRQVFNAQKKAQSSTDSGGSSGGSSGSETPGTSESATPESSGGSSGGSDKKYSIGLAIGTNSVGWAVITDEYKVPSKKFKVLGNTDRHSIKKNLIGALLFDSGETAEATRLKRTARRRYTRRKNRICYLQEIFSNEMAKVDDSFFHRLEESFLVEEDKKHERHPIFGNIVDEVAYHEKYPTIYHLRKKLVDSTDKADLRLIYLALAHMIKFRGHFLIEGDLNPDNSDVDKLFIQLVQTYNQLFEENPINASGVDAKAILSARLSKSRRLENLIAQLPGEKKNGLFGNLIALSLGLTPNFKSNFDLAEDAKLQLSKDTYDDDLDNLLAQIGDQYADLFLAAKNLSDAILLSDILRVNTEITKAPLSASMIKRYDEHHQDLTLLKALVRQQLPEKYKEIFFDQSKNGYAGYIDGGASQEEFYKFIKPILEKMDGTEELLVKLNREDLLRKQRTFDNGSIPHQIHLGELHAILRRQEDFYPFLKDNREKIEKILTFRIPYYVGPLARGNSRFAWMTRKSEETITPWNFEEVVDKGASAQSFIERMTNFDKNLPNEKVLPKHSLLYEYFTVYNELTKVKYVTEGMRKPAFLSGEQKKAIVDLLFKTNRKVTVKQLKEDYFKKIECFDSVEISGVEDRFNASLGTYHDLLKIIKDKDFLDNEENEDILEDIVLTLTLFEDREMIEERLKTYAHLFDDKVMKQLKRRRYTGWGRLSRKLINGIRDKQSGKTILDFLKSDGFANRNFMQLIHDDSLTFKEDIQKAQVSGQGDSLHEHIANLAGSPAIKKGILQTVKVVDELVKVMGRHKPENIVIEMARENQTTQKGQKNSRERMKRIEEGIKELGSQILKEHPVENTQLQNEKLYLYYLQNGRDMYVDQELDINRLSDYDVDHIVPQSFLKDDSIDNKVLTRSDKNRGKSDNVPSEEVVKKMKNYWRQLLNAKLITQRKFDNLTKAERGGLSELDKAGFIKRQLVETRQITKHVAQILDSRMNTKYDENDKLIREVKVITLKSKLVSDFRKDFQFYKVREINNYHHAHDAYLNAVVGTALIKKYPKLESEFVYGDYKVYDVRKMIAKSEQEIGKATAKYFFYSNIMNFFKTEITLANGEIRKRPLIETNGETGEIVWDKGRDFATVRKVLSMPQVNIVKKTEVQTGGFSKESILPKRNSDKLIARKKDWDPKKYGGFVSPTVAYSVLVVAKVEKGKSKKLKSVKELLGITIMERSSFEKNPIDFLEAKGYKEVKKDLIIKLPKYSLFELENGRKRMLASARELQKGNELALPSKYVNFLYLASHYEKLKGSPEDNEQKQLFVEQHKHYLDEIIEQISEFSKRVILADANLDKVLSAYNKHRDKPIREQAENIIHLFTLTNLGAPAAFKYFDTTIDRKQYRSTKEVLDATLIHQSITGLYETRIDLSQLGGDEGADKRTADGSEFESPKKKRKV

SEQ ID NO: 345 - protein, 1588 aa, synthetic construct
  REGION 1..1588: note = 05. monoABE8.1_bpNLS + V82S polypeptide sequence
MSEVEFSHEYWMRHALTLAKRARDEREVPVGAVLVLNNRVIGEGWNRAIGLHDPTAHAEIMALRQGGLVMQNYRLIDATLYSTFEPCVMCAGAMIHSRIGRVVFGVRNAKTGAAGSLMDVLHYPGMNHRVEITEGILADECAALLCYFFRMPRQVFNAQKKAQSSTDSGGSSGGSSGSETPGTSESATPESSGGSSGGSDKKYSIGLAIGTNSVGWAVITDEYKVPSKKFKVLGNTDRHSIKKNLIGALLFDSGETAEATRLKRTARRRYTRRKNRICYLQEIFSNEMAKVDDSFFHRLEESFLVEEDKKHERHPIFGNIVDEVAYHEKYPTIYHLRKKLVDSTDKADLRLIYLALAHMIKFRGHFLIEGDLNPDNSDVDKLFIQLVQTYNQLFEENPINASGVDAKAILSARLSKSRRLENLIAQLPGEKKNGLFGNLIALSLGLTPNFKSNFDLAEDAKLQLSKDTYDDDLDNLLAQIGDQYADLFLAAKNLSDAILLSDILRVNTEITKAPLSASMIKRYDEHHQDLTLLKALVRQQLPEKYKEIFFDQSKNGYAGYIDGGASQEEFYKFIKPILEKMDGTEELLVKLNREDLLRKQRTFDNGSIPHQIHLGELHAILRRQEDFYPFLKDNREKIEKILTFRIPYYVGPLARGNSRFAWMTRKSEETITPWNFEEVVDKGASAQSFIERMTNFDKNLPNEKVLPKHSLLYEYFTVYNELTKVKYVTEGMRKPAFLSGEQKKAIVDLLFKTNRKVTVKQLKEDYFKKIECFDSVEISGVEDRFNASLGTYHDLLKIIKDKDFLDNEENEDILEDIVLTLTLFEDREMIEERLKTYAHLFDDKVMKQLKRRRYTGWGRLSRKLINGIRDKQSGKTILDFLKSDGFANRNFMQLIHDDSLTFKEDIQKAQVSGQGDSLHEHIANLAGSPAIKKGILQTVKVVDELVKVMGRHKPENIVIEMARENQTTQKGQKNSRERMKRIEEGIKELGSQILKEHPVENTQLQNEKLYLYYLQNGRDMYVDQELDINRLSDYDVDHIVPQSFLKDDSIDNKVLTRSDKNRGKSDNVPSEEVVKKMKNYWRQLLNAKLITQRKFDNLTKAERGGLSELDKAGFIKRQLVETRQITKHVAQILDSRMNTKYDENDKLIREVKVITLKSKLVSDFRKDFQFYKVREINNYHHAHDAYLNAVVGTALIKKYPKLESEFVYGDYKVYDVRKMIAKSEQEIGKATAKYFFYSNIMNFFKTEITLANGEIRKRPLIETNGETGEIVWDKGRDFATVRKVLSMPQVNIVKKTEVQTGGFSKESILPKRNSDKLIARKKDWDPKKYGGFVSPTVAYSVLVVAKVEKGKSKKLKSVKELLGITIMERSSFEKNPIDFLEAKGYKEVKKDLIIKLPKYSLFELENGRKRMLASARELQKGNELALPSKYVNFLYLASHYEKLKGSPEDNEQKQLFVEQHKHYLDEIIEQISEFSKRVILADANLDKVLSAYNKHRDKPIREQAENIIHLFTLTNLGAPAAFKYFDTTIDRKQYRSTKEVLDATLIHQSITGLYETRIDLSQLGGDEGADKRTADGSEFESPKKKRKV

SEQ ID NO: 346 - protein, 1588 aa, synthetic construct
  REGION 1..1588: note = 06. monoABE8.1_bpNLS + T166R polypeptide sequence
MSEVEFSHEYWMRHALTLAKRARDEREVPVGAVLVLNNRVIGEGWNRAIGLHDPTAHAEIMALRQGGLVMQNYRLIDATLYVTFEPCVMCAGAMIHSRIGRVVFGVRNAKTGAAGSLMDVLHYPGMNHRVEITEGILADECAALLCYFFRMPRQVFNAQKKAQSSRDSGGSSGGSSGSETPGTSESATPESSGGSSGGSDKKYSIGLAIGTNSVGWAVITDEYKVPSKKFKVLGNTDRHSIKKNLIGALLFDSGETAEATRLKRTARRRYTRRKNRICYLQEIFSNEMAKVDDSFFHRLEESFLVEEDKKHERHPIFGNIVDEVAYHEKYPTIYHLRKKLVDSTDKADLRLIYLALAHMIKFRGHFLIEGDLNPDNSDVDKLFIQLVQTYNQLFEENPINASGVDAKAILSARLSKSRRLENLIAQLPGEKKNGLFGNLIALSLGLTPNFKSNFDLAEDAKLQLSKDTYDDDLDNLLAQIGDQYADLFLAAKNLSDAILLSDILRVNTEITKAPLSASMIKRYDEHHQDLTLLKALVRQQLPEKYKEIFFDQSKNGYAGYIDGGASQEEFYKFIKPILEKMDGTEELLVKLNREDLLRKQRTFDNGSIPHQIHLGELHAILRRQEDFYPFLKDNREKIEKILTFRIPYYVGPLARGNSRFAWMTRKSEETITPWNFEEVVDKGASAQSFIERMTNFDKNLPNEKVLPKHSLLYEYFTVYNELTKVKYVTEGMRKPAFLSGEQKKAIVDLLFKTNRKVTVKQLKEDYFKKIECFDSVEISGVEDRFNASLGTYHDLLKIIKDKDFLDNEENEDILEDIVLTLTLFEDREMIEERLKTYAHLFDDKVMKQLKRRRYTGWGRLSRKLINGIRDKQSGKTILDFLKSDGFANRNFMQLIHDDSLTFKEDIQKAQVSGQGDSLHEHIANLAGSPAIKKGILQTVKVVDELVKVMGRHKPENIVIEMARENQTTQKGQKNSRERMKRIEEGIKELGSQILKEHPVENTQLQNEKLYLYYLQNGRDMYVDQELDINRLSDYDVDHIVPQSFLKDDSIDNKVLTRSDKNRGKSDNVPSEEVVKKMKNYWRQLLNAKLITQRKFDNLTKAERGGLSELDKAGFIKRQLVETRQITKHVAQILDSRMNTKYDENDKLIREVKVITLKSKLVSDFRKDFQFYKVREINNYHHAHDAYLNAVVGTALIKKYPKLESEFVYGDYKVYDVRKMIAKSEQEIGKATAKYFFYSNIMNFFKTEITLANGEIRKRPLIETNGETGEIVWDKGRDFATVRKVLSMPQVNIVKKTEVQTGGFSKESILPKRNSDKLIARKKDWDPKKYGGFVSPTVAYSVLVVAKVEKGKSKKLKSVKELLGITIMERSSFEKNPIDFLEAKGYKEVKKDLIIKLPKYSLFELENGRKRMLASARELQKGNELALPSKYVNFLYLASHYEKLKGSPEDNEQKQLFVEQHKHYLDEIIEQISEFSKRVILADANLDKVLSAYNKHRDKPIREQAENIIHLFTLTNLGAPAAFKYFDTTIDRKQYRSTKEVLDATLIHQSITGLYETRIDLSQLGGDEGADKRTADGSEFESPKKKRKV

SEQ ID NO: 347 - protein, 1588 aa, synthetic construct
  REGION 1..1588: note = 07. monoABE8.1_bpNLS + Q154R polypeptide sequence
MSEVEFSHEYWMRHALTLAKRARDEREVPVGAVLVLNNRVIGEGWNRAIGLHDPTAHAEIMALRQGGLVMQNYRLIDATLYVTFEPCVMCAGAMIHSRIGRVVFGVRNAKTGAAGSLMDVLHYPGMNHRVEITEGILADECAALLCYFFRMPRRVFNAQKKAQSSTDSGGSSGGSSGSETPGTSESATPESSGGSSGGSDKKYSIGLAIGTNSVGWAVITDEYKVPSKKFKVLGNTDRHSIKKNLIGALLFDSGETAEATRLKRTARRRYTRRKNRICYLQEIFSNEMAKVDDSFFHRLEESFLVEEDKKHERHPIFGNIVDEVAYHEKYPTIYHLRKKLVDSTDKADLRLIYLALAHMIKFRGHFLIEGDLNPDNSDVDKLFIQLVQTYNQLFEENPINASGVDAKAILSARLSKSRRLENLIAQLPGEKKNGLFGNLIALSLGLTPNFKSNFDLAEDAKLQLSKDTYDDDLDNLLAQIGDQYADLFLAAKNLSDAILLSDILRVNTEITKAPLSASMIKRYDEHHQDLTLLKALVRQQLPEKYKEIFFDQSKNGYAGYIDGGASQEEFYKFIKPILEKMDGTEELLVKLNREDLLRKQRTFDNGSIPHQIHLGELHAILRRQEDFYPFLKDNREKIEKILTFRIPYYVGPLARGNSRFAWMTRKSEETITPWNFEEVVDKGASAQSFIERMTNFDKNLPNEKVLPKHSLLYEYFTVYNELTKVKYVTEGMRKPAFLSGEQKKAIVDLLFKTNRKVTVKQLKEDYFKKIECFDSVEISGVEDRFNASLGTYHDLLKIIKDKDFLDNEENEDILEDIVLTLTLFEDREMIEERLKTYAHLFDDKVMKQLKRRRYTGWGRLSRKLINGIRDKQSGKTILDFLKSDGFANRNFMQLIHDDSLTFKEDIQKAQVSGQGDSLHEHIANLAGSPAIKKGILQTVKVVDELVKVMGRHKPENIVIEMARENQTTQKGQKNSRERMKRIEEGIKELGSQILKEHPVENTQLQNEKLYLYYLQNGRDMYVDQELDINRLSDYDVDHIVPQSFLKDDSIDNKVLTRSDKNRGKSDNVPSEEVVKKMKNYWRQLLNAKLITQRKFDNLTKAERGGLSELDKAGFIKRQLVETRQITKHVAQILDSRMNTKYDENDKLIREVKVITLKSKLVSDFRKDFQFYKVREINNYHHAHDAYLNAVVGTALIKKYPKLESEFVYGDYKVYDVRKMIAKSEQEIGKATAKYFFYSNIMNFFKTEITLANGEIRKRPLIETNGETGEIVWDKGRDFATVRKVLSMPQVNIVKKTEVQTGGFSKESILPKRNSDKLIARKKDWDPKKYGGFVSPTVAYSVLVVAKVEKGKSKKLKSVKELLGITIMERSSFEKNPIDFLEAKGYKEVKKDLIIKLPKYSLFELENGRKRMLASARELQKGNELALPSKYVNFLYLASHYEKLKGSPEDNEQKQLFVEQHKHYLDEIIEQISEFSKRVILADANLDKVLSAYNKHRDKPIREQAENIIHLFTLTNLGAPAAFKYFDTTIDRKQYRSTKEVLDATLIHQSITGLYETRIDLSQLGGDEGADKRTADGSEFESPKKKRKV

SEQ ID NO: 348 - protein, 1588 aa, synthetic construct
  REGION 1..1588: note = 08. monoABE8.1_bpNLS +Y147R_Q154R_Y123H polypeptide sequence
MSEVEFSHEYWMRHALTLAKRARDEREVPVGAVLVLNNRVIGEGWNRAIGLHDPTAHAEIMALRQGGLVMQNYRLIDATLYVTFEPCVMCAGAMIHSRIGRVVFGVRNAKTGAAGSLMDVLHHPGMNHRVEITEGILADECAALLCRFFRMPRRVFNAQKKAQSSTDSGGSSGGSSGSETPGTSESATPESSGGSSGGSDKKYSIGLAIGTNSVGWAVITDEYKVPSKKFKVLGNTDRHSIKKNLIGALLFDSGETAEATRLKRTARRRYTRRKNRICYLQEIFSNEMAKVDDSFFHRLEESFLVEEDKKHERHPIFGNIVDEVAYHEKYPTIYHLRKKLVDSTDKADLRLIYLALAHMIKFRGHFLIEGDLNPDNSDVDKLFIQLVQTYNQLFEENPINASGVDAKAILSARLSKSRRLENLIAQLPGEKKNGLFGNLIALSLGLTPNFKSNFDLAEDAKLQLSKDTYDDDLDNLLAQIGDQYADLFLAAKNLSDAILLSDILRVNTEITKAPLSASMIKRYDEHHQDLTLLKALVRQQLPEKYKEIFFDQSKNGYAGYIDGGASQEEFYKFIKPILEKMDGTEELLVKLNREDLLRKQRTFDNGSIPHQIHLGELHAILRRQEDFYPFLKDNREKIEKILTFRIPYYVGPLARGNSRFAWMTRKSEETITPWNFEEVVDKGASAQSFIERMTNFDKNLPNEKVLPKHSLLYEYFTVYNELTKVKYVTEGMRKPAFLSGEQKKAIVDLLFKTNRKVTVKQLKEDYFKKIECFDSVEISGVEDRFNASLGTYHDLLKIIKDKDFLDNEENEDILEDIVLTLTLFEDREMIEERLKTYAHLFDDKVMKQLKRRRYTGWGRLSRKLINGIRDKQSGKTILDFLKSDGFANRNFMQLIHDDSLTFKEDIQKAQVSGQGDSLHEHIANLAGSPAIKKGILQTVKVVDELVKVMGRHKPENIVIEMARENQTTQKGQKNSRERMKRIEEGIKELGSQILKEHPVENTQLQNEKLYLYYLQNGRDMYVDQELDINRLSDYDVDHIVPQSFLKDDSIDNKVLTRSDKNRGKSDNVPSEEVVKKMKNYWRQLLNAKLITQRKFDNLTKAERGGLSELDKAGFIKRQLVETRQITKHVAQILDSRMNTKYDENDKLIREVKVITLKSKLVSDFRKDFQFYKVREINNYHHAHDAYLNAVVGTALIKKYPKLESEFVYGDYKVYDVRKMIAKSEQEIGKATAKYFFYSNIMNFFKTEITLANGEIRKRPLIETNGETGEIVWDKGRDFATVRKVLSMPQVNIVKKTEVQTGGFSKESILPKRNSDKLIARKKDWDPKKYGGFVSPTVAYSVLVVAKVEKGKSKKLKSVKELLGITIMERSSFEKNPIDFLEAKGYKEVKKDLIIKLPKYSLFELENGRKRMLASARELQKGNELALPSKYVNFLYLASHYEKLKGSPEDNEQKQLFVEQHKHYLDEIIEQISEFSKRVILADANLDKVLSAYNKHRDKPIREQAENIIHLFTLTNLGAPAAFKYFDTTIDRKQYRSTKEVLDATLIHQSITGLYETRIDLSQLGGDEGADKRTADGSEFESPKKKRKV

SEQ ID NO: 349 - protein, 1588 aa, synthetic construct
  REGION 1..1588: note = 09. monoABE8.1_bpNLS +Y147R_Q154R_I76Y polypeptide sequence
MSEVEFSHEYWMRHALTLAKRARDEREVPVGAVLVLNNRVIGEGWNRAIGLHDPTAHAEIMALRQGGLVMQNYRLYDATLYVTFEPCVMCAGAMIHSRIGRVVFGVRNAKTGAAGSLMDVLHYPGMNHRVEITEGILADECAALLCRFFRMPRRVFNAQKKAQSSTDSGGSSGGSSGSETPGTSESATPESSGGSSGGSDKKYSIGLAIGTNSVGWAVITDEYKVPSKKFKVLGNTDRHSIKKNLIGALLFDSGETAEATRLKRTARRRYTRRKNRICYLQEIFSNEMAKVDDSFFHRLEESFLVEEDKKHERHPIFGNIVDEVAYHEKYPTIYHLRKKLVDSTDKADLRLIYLALAHMIKFRGHFLIEGDLNPDNSDVDKLFIQLVQTYNQLFEENPINASGVDAKAILSARLSKSRRLENLIAQLPGEKKNGLFGNLIALSLGLTPNFKSNFDLAEDAKLQLSKDTYDDDLDNLLAQIGDQYADLFLAAKNLSDAILLSDILRVNTEITKAPLSASMIKRYDEHHQDLTLLKALVRQQLPEKYKEIFFDQSKNGYAGYIDGGASQEEFYKFIKPILEKMDGTEELLVKLNREDLLRKQRTFDNGSIPHQIHLGELHAILRRQEDFYPFLKDNREKIEKILTFRIPYYVGPLARGNSRFAWMTRKSEETITPWNFEEVVDKGASAQSFIERMTNFDKNLPNEKVLPKHSLLYEYFTVYNELTKVKYVTEGMRKPAFLSGEQKKAIVDLLFKTNRKVTVKQLKEDYFKKIECFDSVEISGVEDRFNASLGTYHDLLKIIKDKDFLDNEENEDILEDIVLTLTLFEDREMIEERLKTYAHLFDDKVMKQLKRRRYTGWGRLSRKLINGIRDKQSGKTILDFLKSDGFANRNFMQLIHDDSLTFKEDIQKAQVSGQGDSLHEHIANLAGSPAIKKGILQTVKVVDELVKVMGRHKPENIVIEMARENQTTQKGQKNSRERMKRIEEGIKELGSQILKEHPVENTQLQNEKLYLYYLQNGRDMYVDQELDINRLSDYDVDHIVPQSFLKDDSIDNKVLTRSDKNRGKSDNVPSEEVVKKMKNYWRQLLNAKLITQRKFDNLTKAERGGLSELDKAGFIKRQLVETRQITKHVAQILDSRMNTKYDENDKLIREVKVITLKSKLVSDFRKDFQFYKVREINNYHHAHDAYLNAVVGTALIKKYPKLESEFVYGDYKVYDVRKMIAKSEQEIGKATAKYFFYSNIMNFFKTEITLANGEIRKRPLIETNGETGEIVWDKGRDFATVRKVLSMPQVNIVKKTEVQTGGFSKESILPKRNSDKLIARKKDWDPKKYGGFVSPTVAYSVLVVAKVEKGKSKKLKSVKELLGITIMERSSFEKNPIDFLEAKGYKEVKKDLIIKLPKYSLFELENGRKRMLASARELQKGNELALPSKYVNFLYLASHYEKLKGSPEDNEQKQLFVEQHKHYLDEIIEQISEFSKRVILADANLDKVLSAYNKHRDKPIREQAENIIHLFTLTNLGAPAAFKYFDTTIDRKQYRSTKEVLDATLIHQSITGLYETRIDLSQLGGDEGADKRTADGSEFESPKKKRKV

SEQ ID NO: 350 - protein, 1588 aa, synthetic construct
  REGION 1..1588: note = 10. monoABE8.1_bpNLS +Y147R_Q154R_T166R polypeptide sequence
MSEVEFSHEYWMRHALTLAKRARDEREVPVGAVLVLNNRVIGEGWNRAIGLHDPTAHAEIMALRQGGLVMQNYRLIDATLYVTFEPCVMCAGAMIHSRIGRVVFGVRNAKTGAAGSLMDVLHYPGMNHRVEITEGILADECAALLCRFFRMPRRVFNAQKKAQSSRDSGGSSGGSSGSETPGTSESATPESSGGSSGGSDKKYSIGLAIGTNSVGWAVITDEYKVPSKKFKVLGNTDRHSIKKNLIGALLFDSGETAEATRLKRTARRRYTRRKNRICYLQEIFSNEMAKVDDSFFHRLEESFLVEEDKKHERHPIFGNIVDEVAYHEKYPTIYHLRKKLVDSTDKADLRLIYLALAHMIKFRGHFLIEGDLNPDNSDVDKLFIQLVQTYNQLFEENPINASGVDAKAILSARLSKSRRLENLIAQLPGEKKNGLFGNLIALSLGLTPNFKSNFDLAEDAKLQLSKDTYDDDLDNLLAQIGDQYADLFLAAKNLSDAILLSDILRVNTEITKAPLSASMIKRYDEHHQDLTLLKALVRQQLPEKYKEIFFDQSKNGYAGYIDGGASQEEFYKFIKPILEKMDGTEELLVKLNREDLLRKQRTFDNGSIPHQIHLGELHAILRRQEDFYPFLKDNREKIEKILTFRIPYYVGPLARGNSRFAWMTRKSEETITPWNFEEVVDKGASAQSFIERMTNFDKNLPNEKVLPKHSLLYEYFTVYNELTKVKYVTEGMRKPAFLSGEQKKAIVDLLFKTNRKVTVKQLKEDYFKKIECFDSVEISGVEDRFNASLGTYHDLLKIIKDKDFLDNEENEDILEDIVLTLTLFEDREMIEERLKTYAHLFDDKVMKQLKRRRYTGWGRLSRKLINGIRDKQSGKTILDFLKSDGFANRNFMQLIHDDSLTFKEDIQKAQVSGQGDSLHEHIANLAGSPAIKKGILQTVKVVDELVKVMGRHKPENIVIEMARENQTTQKGQKNSRERMKRIEEGIKELGSQILKEHPVENTQLQNEKLYLYYLQNGRDMYVDQELDINRLSDYDVDHIVPQSFLKDDSIDNKVLTRSDKNRGKSDNVPSEEVVKKMKNYWRQLLNAKLITQRKFDNLTKAERGGLSELDKAGFIKRQLVETRQITKHVAQILDSRMNTKYDENDKLIREVKVITLKSKLVSDFRKDFQFYKVREINNYHHAHDAYLNAVVGTALIKKYPKLESEFVYGDYKVYDVRKMIAKSEQEIGKATAKYFFYSNIMNFFKTEITLANGEIRKRPLIETNGETGEIVWDKGRDFATVRKVLSMPQVNIVKKTEVQTGGFSKESILPKRNSDKLIARKKDWDPKKYGGFVSPTVAYSVLVVAKVEKGKSKKLKSVKELLGITIMERSSFEKNPIDFLEAKGYKEVKKDLIIKLPKYSLFELENGRKRMLASARELQKGNELALPSKYVNFLYLASHYEKLKGSPEDNEQKQLFVEQHKHYLDEIIEQISEFSKRVILADANLDKVLSAYNKHRDKPIREQAENIIHLFTLTNLGAPAAFKYFDTTIDRKQYRSTKEVLDATLIHQSITGLYETRIDLSQLGGDEGADKRTADGSEFESPKKKRKV

SEQ ID NO: 351 - protein, 1588 aa, synthetic construct
  REGION 1..1588: note = 11. monoABE8.1_bpNLS +Y147T_Q154R polypeptide sequence
MSEVEFSHEYWMRHALTLAKRARDEREVPVGAVLVLNNRVIGEGWNRAIGLHDPTAHAEIMALRQGGLVMQNYRLIDATLYVTFEPCVMCAGAMIHSRIGRVVFGVRNAKTGAAGSLMDVLHYPGMNHRVEITEGILADECAALLCTFFRMPRRVFNAQKKAQSSTDSGGSSGGSSGSETPGTSESATPESSGGSSGGSDKKYSIGLAIGTNSVGWAVITDEYKVPSKKFKVLGNTDRHSIKKNLIGALLFDSGETAEATRLKRTARRRYTRRKNRICYLQEIFSNEMAKVDDSFFHRLEESFLVEEDKKHERHPIFGNIVDEVAYHEKYPTIYHLRKKLVDSTDKADLRLIYLALAHMIKFRGHFLIEGDLNPDNSDVDKLFIQLVQTYNQLFEENPINASGVDAKAILSARLSKSRRLENLIAQLPGEKKNGLFGNLIALSLGLTPNFKSNFDLAEDAKLQLSKDTYDDDLDNLLAQIGDQYADLFLAAKNLSDAILLSDILRVNTEITKAPLSASMIKRYDEHHQDLTLLKALVRQQLPEKYKEIFFDQSKNGYAGYIDGGASQEEFYKFIKPILEKMDGTEELLVKLNREDLLRKQRTFDNGSIPHQIHLGELHAILRRQEDFYPFLKDNREKIEKILTFRIPYYVGPLARGNSRFAWMTRKSEETITPWNFEEVVDKGASAQSFIERMTNFDKNLPNEKVLPKHSLLYEYFTVYNELTKVKYVTEGMRKPAFLSGEQKKAIVDLLFKTNRKVTVKQLKEDYFKKIECFDSVEISGVEDRFNASLGTYHDLLKIIKDKDFLDNEENEDILEDIVLTLTLFEDREMIEERLKTYAHLFDDKVMKQLKRRRYTGWGRLSRKLINGIRDKQSGKTILDFLKSDGFANRNFMQLIHDDSLTFKEDIQKAQVSGQGDSLHEHIANLAGSPAIKKGILQTVKVVDELVKVMGRHKPENIVIEMARENQTTQKGQKNSRERMKRIEEGIKELGSQILKEHPVENTQLQNEKLYLYYLQNGRDMYVDQELDINRLSDYDVDHIVPQSFLKDDSIDNKVLTRSDKNRGKSDNVPSEEVVKKMKNYWRQLLNAKLITQRKFDNLTKAERGGLSELDKAGFIKRQLVETRQITKHVAQILDSRMNTKYDENDKLIREVKVITLKSKLVSDFRKDFQFYKVREINNYHHAHDAYLNAVVGTALIKKYPKLESEFVYGDYKVYDVRKMIAKSEQEIGKATAKYFFYSNIMNFFKTEITLANGEIRKRPLIETNGETGEIVWDKGRDFATVRKVLSMPQVNIVKKTEVQTGGFSKESILPKRNSDKLIARKKDWDPKKYGGFVSPTVAYSVLVVAKVEKGKSKKLKSVKELLGITIMERSSFEKNPIDFLEAKGYKEVKKDLIIKLPKYSLFELENGRKRMLASARELQKGNELALPSKYVNFLYLASHYEKLKGSPEDNEQKQLFVEQHKHYLDEIIEQISEFSKRVILADANLDKVLSAYNKHRDKPIREQAENIIHLFTLTNLGAPAAFKYFDTTIDRKQYRSTKEVLDATLIHQSITGLYETRIDLSQLGGDEGADKRTADGSEFESPKKKRKV

SEQ ID NO: 352 - protein, 1588 aa, synthetic construct
  REGION 1..1588: note = 12. monoABE8.1_bpNLS +Y147T_Q154S polypeptide sequence
MSEVEFSHEYWMRHALTLAKRARDEREVPVGAVLVLNNRVIGEGWNRAIGLHDPTAHAEIMALRQGGLVMQNYRLIDATLYVTFEPCVMCAGAMIHSRIGRVVFGVRNAKTGAAGSLMDVLHYPGMNHRVEITEGILADECAALLCTFFRMPRSVFNAQKKAQSSTDSGGSSGGSSGSETPGTSESATPESSGGSSGGSDKKYSIGLAIGTNSVGWAVITDEYKVPSKKFKVLGNTDRHSIKKNLIGALLFDSGETAEATRLKRTARRRYTRRKNRICYLQEIFSNEMAKVDDSFFHRLEESFLVEEDKKHERHPIFGNIVDEVAYHEKYPTIYHLRKKLVDSTDKADLRLIYLALAHMIKFRGHFLIEGDLNPDNSDVDKLFIQLVQTYNQLFEENPINASGVDAKAILSARLSKSRRLENLIAQLPGEKKNGLFGNLIALSLGLTPNFKSNFDLAEDAKLQLSKDTYDDDLDNLLAQIGDQYADLFLAAKNLSDAILLSDILRVNTEITKAPLSASMIKRYDEHHQDLTLLKALVRQQLPEKYKEIFFDQSKNGYAGYIDGGASQEEFYKFIKPILEKMDGTEELLVKLNREDLLRKQRTFDNGSIPHQIHLGELHAILRRQEDFYPFLKDNREKIEKILTFRIPYYVGPLARGNSRFAWMTRKSEETITPWNFEEVVDKGASAQSFIERMTNFDKNLPNEKVLPKHSLLYEYFTVYNELTKVKYVTEGMRKPAFLSGEQKKAIVDLLFKTNRKVTVKQLKEDYFKKIECFDSVEISGVEDRFNASLGTYHDLLKIIKDKDFLDNEENEDILEDIVLTLTLFEDREMIEERLKTYAHLFDDKVMKQLKRRRYTGWGRLSRKLINGIRDKQSGKTILDFLKSDGFANRNFMQLIHDDSLTFKEDIQKAQVSGQGDSLHEHIANLAGSPAIKKGILQTVKVVDELVKVMGRHKPENIVIEMARENQTTQKGQKNSRERMKRIEEGIKELGSQILKEHPVENTQLQNEKLYLYYLQNGRDMYVDQELDINRLSDYDVDHIVPQSFLKDDSIDNKVLTRSDKNRGKSDNVPSEEVVKKMKNYWRQLLNAKLITQRKFDNLTKAERGGLSELDKAGFIKRQLVETRQITKHVAQILDSRMNTKYDENDKLIREVKVITLKSKLVSDFRKDFQFYKVREINNYHHAHDAYLNAVVGTALIKKYPKLESEFVYGDYKVYDVRKMIAKSEQEIGKATAKYFFYSNIMNFFKTEITLANGEIRKRPLIETNGETGEIVWDKGRDFATVRKVLSMPQVNIVKKTEVQTGGFSKESILPKRNSDKLIARKKDWDPKKYGGFVSPTVAYSVLVVAKVEKGKSKKLKSVKELLGITIMERSSFEKNPIDFLEAKGYKEVKKDLIIKLPKYSLFELENGRKRMLASARELQKGNELALPSKYVNFLYLASHYEKLKGSPEDNEQKQLFVEQHKHYLDEIIEQISEFSKRVILADANLDKVLSAYNKHRDKPIREQAENIIHLFTLTNLGAPAAFKYFDTTIDRKQYRSTKEVLDATLIHQSITGLYETRIDLSQLGGDEGADKRTADGSEFESPKKKRKV

SEQ ID NO: 353 - protein, 1588 aa, synthetic construct
  REGION 1..1588: note = 13. monoABE8.1_bpNLS +H123Y123H_Y147R_Q154R_I76Y polypeptide sequence
MSEVEFSHEYWMRHALTLAKRARDEREVPVGAVLVLNNRVIGEGWNRAIGLHDPTAHAEIMALRQGGLVMQNYRLYDATLYVTFEPCVMCAGAMIHSRIGRVVFGVRNAKTGAAGSLMDVLHHPGMNHRVEITEGILADECAALLCRFFRMPRRVFNAQKKAQSSTDSGGSSGGSSGSETPGTSESATPESSGGSSGGSDKKYSIGLAIGTNSVGWAVITDEYKVPSKKFKVLGNTDRHSIKKNLIGALLFDSGETAEATRLKRTARRRYTRRKNRICYLQEIFSNEMAKVDDSFFHRLEESFLVEEDKKHERHPIFGNIVDEVAYHEKYPTIYHLRKKLVDSTDKADLRLIYLALAHMIKFRGHFLIEGDLNPDNSDVDKLFIQLVQTYNQLFEENPINASGVDAKAILSARLSKSRRLENLIAQLPGEKKNGLFGNLIALSLGLTPNFKSNFDLAEDAKLQLSKDTYDDDLDNLLAQIGDQYADLFLAAKNLSDAILLSDILRVNTEITKAPLSASMIKRYDEHHQDLTLLKALVRQQLPEKYKEIFFDQSKNGYAGYIDGGASQEEFYKFIKPILEKMDGTEELLVKLNREDLLRKQRTFDNGSIPHQIHLGELHAILRRQEDFYPFLKDNREKIEKILTFRIPYYVGPLARGNSRFAWMTRKSEETITPWNFEEVVDKGASAQSFIERMTNFDKNLPNEKVLPKHSLLYEYFTVYNELTKVKYVTEGMRKPAFLSGEQKKAIVDLLFKTNRKVTVKQLKEDYFKKIECFDSVEISGVEDRFNASLGTYHDLLKIIKDKDFLDNEENEDILEDIVLTLTLFEDREMIEERLKTYAHLFDDKVMKQLKRRRYTGWGRLSRKLINGIRDKQSGKTILDFLKSDGFANRNFMQLIHDDSLTFKEDIQKAQVSGQGDSLHEHIANLAGSPAIKKGILQTVKVVDELVKVMGRHKPENIVIEMARENQTTQKGQKNSRERMKRIEEGIKELGSQILKEHPVENTQLQNEKLYLYYLQNGRDMYVDQELDINRLSDYDVDHIVPQSFLKDDSIDNKVLTRSDKNRGKSDNVPSEEVVKKMKNYWRQLLNAKLITQRKFDNLTKAERGGLSELDKAGFIKRQLVETRQITKHVAQILDSRMNTKYDENDKLIREVKVITLKSKLVSDFRKDFQFYKVREINNYHHAHDAYLNAVVGTALIKKYPKLESEFVYGDYKVYDVRKMIAKSEQEIGKATAKYFFYSNIMNFFKTEITLANGEIRKRPLIETNGETGEIVWDKGRDFATVRKVLSMPQVNIVKKTEVQTGGFSKESILPKRNSDKLIARKKDWDPKKYGGFVSPTVAYSVLVVAKVEKGKSKKLKSVKELLGITIMERSSFEKNPIDFLEAKGYKEVKKDLIIKLPKYSLFELENGRKRMLASARELQKGNELALPSKYVNFLYLASHYEKLKGSPEDNEQKQLFVEQHKHYLDEIIEQISEFSKRVILADANLDKVLSAYNKHRDKPIREQAENIIHLFTLTNLGAPAAFKYFDTTIDRKQYRSTKEVLDATLIHQSITGLYETRIDLSQLGGDEGADKRTADGSEFESPKKKRKV

SEQ ID NO: 354 - protein, 1588 aa, synthetic construct
  REGION 1..1588: note = 14. monoABE8.1_bpNLS + V82S +Q154R polypeptide sequence
MSEVEFSHEYWMRHALTLAKRARDEREVPVGAVLVLNNRVIGEGWNRAIGLHDPTAHAEIMALRQGGLVMQNYRLIDATLYSTFEPCVMCAGAMIHSRIGRVVFGVRNAKTGAAGSLMDVLHYPGMNHRVEITEGILADECAALLCYFFRMPRRVFNAQKKAQSSTDSGGSSGGSSGSETPGTSESATPESSGGSSGGSDKKYSIGLAIGTNSVGWAVITDEYKVPSKKFKVLGNTDRHSIKKNLIGALLFDSGETAEATRLKRTARRRYTRRKNRICYLQEIFSNEMAKVDDSFFHRLEESFLVEEDKKHERHPIFGNIVDEVAYHEKYPTIYHLRKKLVDSTDKADLRLIYLALAHMIKFRGHFLIEGDLNPDNSDVDKLFIQLVQTYNQLFEENPINASGVDAKAILSARLSKSRRLENLIAQLPGEKKNGLFGNLIALSLGLTPNFKSNFDLAEDAKLQLSKDTYDDDLDNLLAQIGDQYADLFLAAKNLSDAILLSDILRVNTEITKAPLSASMIKRYDEHHQDLTLLKALVRQQLPEKYKEIFFDQSKNGYAGYIDGGASQEEFYKFIKPILEKMDGTEELLVKLNREDLLRKQRTFDNGSIPHQIHLGELHAILRRQEDFYPFLKDNREKIEKILTFRIPYYVGPLARGNSRFAWMTRKSEETITPWNFEEVVDKGASAQSFIERMTNFDKNLPNEKVLPKHSLLYEYFTVYNELTKVKYVTEGMRKPAFLSGEQKKAIVDLLFKTNRKVTVKQLKEDYFKKIECFDSVEISGVEDRFNASLGTYHDLLKIIKDKDFLDNEENEDILEDIVLTLTLFEDREMIEERLKTYAHLFDDKVMKQLKRRRYTGWGRLSRKLINGIRDKQSGKTILDFLKSDGFANRNFMQLIHDDSLTFKEDIQKAQVSGQGDSLHEHIANLAGSPAIKKGILQTVKVVDELVKVMGRHKPENIVIEMARENQTTQKGQKNSRERMKRIEEGIKELGSQILKEHPVENTQLQNEKLYLYYLQNGRDMYVDQELDINRLSDYDVDHIVPQSFLKDDSIDNKVLTRSDKNRGKSDNVPSEEVVKKMKNYWRQLLNAKLITQRKFDNLTKAERGGLSELDKAGFIKRQLVETRQITKHVAQILDSRMNTKYDENDKLIREVKVITLKSKLVSDFRKDFQFYKVREINNYHHAHDAYLNAVVGTALIKKYPKLESEFVYGDYKVYDVRKMIAKSEQEIGKATAKYFFYSNIMNFFKTEITLANGEIRKRPLIETNGETGEIVWDKGRDFATVRKVLSMPQVNIVKKTEVQTGGFSKESILPKRNSDKLIARKKDWDPKKYGGFVSPTVAYSVLVVAKVEKGKSKKLKSVKELLGITIMERSSFEKNPIDFLEAKGYKEVKKDLIIKLPKYSLFELENGRKRMLASARELQKGNELALPSKYVNFLYLASHYEKLKGSPEDNEQKQLFVEQHKHYLDEIIEQISEFSKRVILADANLDKVLSAYNKHRDKPIREQAENIIHLFTLTNLGAPAAFKYFDTTIDRKQYRSTKEVLDATLIHQSITGLYETRIDLSQLGGDEGADKRTADGSEFESPKKKRKV

SEQ ID NO: 355 - protein, 4 aa, synthetic construct
  REGION 1..4: note = synthetic peptide sequence
SGGS

SEQ ID NO: 356 - protein, 24 aa, synthetic construct
  REGION 1..24: note = synthetic peptide sequence
SGGSSGSETPGTSESATPESSGGS

SEQ ID NO: 357 - protein, 32 aa, synthetic construct
  REGION 1..32: note = synthetic polypeptide sequence
SGGSSGGSSGSETPGTSESATPESSGGSSGGS

SEQ ID NO: 358 - protein, 104 aa, synthetic construct
  REGION 1..104: note = synthetic polypeptide sequence
GGSGGSPGSPAGSPTSTEEGTSESATPESGPGTSTEPSEGSAPGSPAGSPTSTEEGTSTEPSEGSAPGTSTEPSEGSAPGTSESATPESGPGSEPATSGGSGGS

SEQ ID NO: 359 - protein, 24 aa, synthetic construct
  REGION 1..24: note = synthetic peptide sequence
SGGSSGGSSGSETPGTSESATPES

SEQ ID NO: 360 - protein, 40 aa, synthetic construct
  REGION 1..40: note = synthetic polypeptide sequence
SGGSSGGSSGSETPGTSESATPESSGGSSGGSSGGSSGGS

SEQ ID NO: 361 - protein, 64 aa, synthetic construct
  REGION 1..64: note = synthetic polypeptide sequence
SGGSSGGSSGSETPGTSESATPESSGGSSGGSSGGSSGGSSGSETPGTSESATPESSGGSSGGS

SEQ ID NO: 362 - protein, 92 aa, synthetic construct
  REGION 1..92: note = synthetic polypeptide sequence
PGSPAGSPTSTEEGTSESATPESGPGTSTEPSEGSAPGSPAGSPTSTEEGTSTEPSEGSAPGTSTEPSEGSAPGTSESATPESGPGSEPATS

SEQ ID NO: 363 - protein, 5 aa, synthetic construct
  REGION 1..5: note = synthetic peptide sequence
PAPAP

SEQ ID NO: 364 - protein, 6 aa, synthetic construct
  REGION 1..6: note = synthetic peptide sequence
PAPAPA

SEQ ID NO: 365 - protein, 7 aa, synthetic construct
  REGION 1..7: note = synthetic peptide sequence
PAPAPAP

SEQ ID NO: 366 - protein, 8 aa, synthetic construct
  REGION 1..8: note = synthetic peptide sequence
PAPAPAPA

SEQ ID NO: 367 - protein, 9 aa, synthetic construct
  REGION 1..9: note = synthetic peptide sequence
PAPAPAPAP

SEQ ID NO: 368 - protein, 15 aa, synthetic construct
  REGION 1..15: note = synthetic peptide sequence
PAPAPAPAPAPAPAP

SEQ ID NO: 369 - protein, 21 aa, synthetic construct
  REGION 1..21: note = synthetic peptide sequence
PAPAPAPAPAPAPAPAPAPAP

SEQ ID NO: 370 - DNA, 306 bp, synthetic construct
  misc_feature 1..306: note = DnaE Intein-N polynucleotide sequence
  source 1..306: mol_type = other DNA
tgcctgtcatacgaaaccgagatactgacagtagaatatggccttctgccaatcgggaagattgtggagaaacggatagaatgcacagtttactctgtcgataacaatggtaacatttatactcagccagttgcccagtggcacgaccggggagagcaggaagtattcgaatactgtctggaggatggaagtctcattagggccactaaggaccacaaatttatgacagtcgatggccagatgctgcctatagacgaaatctttgagcgagagttggacctcatgcgagttgacaaccttcctaat

SEQ ID NO: 371 - protein, 102 aa, synthetic construct
  REGION 1..102: note = DnaE Intein-N polypeptide sequence
CLSYETEILTVEYGLLPIGKIVEKRIECTVYSVDNNGNIYTQPVAQWHDRGEQEVFEYCLEDGSLIRATKDHKFMTVDGQMLPIDEIFERELDLMRVDNLPN

SEQ ID NO: 372 - DNA, 108 bp, synthetic construct
  misc_feature 1..108: note = DnaE Intein-C polynucleotide sequence
  source 1..108: mol_type = other DNA
atgatcaagatagctacaaggaagtatcttggcaaacaaaacgtttatgatattggagtcgaaagagatcacaactttgctctgaagaacggattcatagcttctaat

SEQ ID NO: 373 - protein, 36 aa, synthetic construct
  REGION 1..36: note = DnaE Intein-C polypeptide sequence
MIKIATRKYLGKQNVYDIGVERDHNFALKNGFIASN

SEQ ID NO: 374 - DNA, 303 bp, synthetic construct
  misc_feature 1..303: note = Cfa-N polynucleotide sequence
  source 1..303: mol_type = other DNA
tgcctgtcttatgataccgagatacttaccgttgaatatggcttcttgcctattggaaagattgtcgaagagagaattgaatgcacagtatatactgtagacaagaatggtttcgtttacacacagcccattgctcaatggcacaatcgcggcgaacaagaagtatttgagtactgtctcgaggatggaagcatcatacgagcaactaaagatcataaattcatgaccactgacgggcagatgttgccaatagatgagatattcgagcggggcttggatctcaaacaagtggatggattgcca

SEQ ID NO: 375 - protein, 101 aa, synthetic construct
  REGION 1..101: note = Cfa-N polypeptide sequence
CLSYDTEILTVEYGFLPIGKIVEERIECTVYTVDKNGFVYTQPIAQWHNRGEQEVFEYCLEDGSIIRATKDHKFMTTDGQMLPIDEIFERGLDLKQVDGLP

SEQ ID NO: 376 - DNA, 159 bp, synthetic construct
  misc_feature 1..159: note = Cfa-C polynucleotide sequence
  source 1..159: mol_type = other DNA
atgaagaggactgccgatggatcagagtttgaatctcccaagaagaagaggaaagtaaagataatatctcgaaaaagtcttggtacccaaaatgtctatgatattggagtggagaaagatcacaacttccttctcaagaacggtctcgtagccagcaac

SEQ ID NO: 377 - protein, 53 aa, synthetic construct
  REGION 1..53: note = Cfa-C polypeptide sequence
MKRTADGSEFESPKKKRKVKIISRKSLGTQNVYDIGVEKDHNFLLKNGLVASN

SEQ ID NO: 378 - protein, 1081 aa, Neisseria meningitidis
  REGION 1..1081: note = MISC_FEATURE - Nme3Cas9; WP_002217928.1 type II CRISPR RNA-guided endonuclease Cas9 [Neisseria meningitidis]
  REGION 1..1081: note = MISC_FEATURE - NCBI Reference: WP_002217928.1; type II CRISPR RNA-guided endonuclease Cas9; Nme3Cas9 polypeptide sequence
MAAFKPNPINYILGLDIGIASVGWAMVEIDEEENPIRLIDLGVRVFERAEVPKTGDSLAMARRLARSVRRLTRRRAHRLLRARRLLKREGVLQAADFDENGLIKSLPNTPWQLRAAALDRKLTPLEWSAVLLHLIKHRGYLSQRKNEGETADKELGALLKGVADNAHALQTGDFRTPAELALNKFEKECGHIRNQRGDYSHTFSRKDLQAELNLLFEKQKEFGNPHVSGGLKEGIETLLMTQRPALSGDAVQKMLGHCTFEPAEPKAAKNTYTAERFIWLTKLNNLRILEQGSERPLTDTERATLMDEPYRKSKLTYAQARKLLSLEDTAFFKGLRYGKDNAEASTLMEMKAYHTISRALEKEGLKDKKSPLNLSPELQDEIGTAFSLFKTDEDITGRLKDRIQPEILEALLKHISFDKFVQISLKALRRIVPLMEQGKRYDEACAEIYGDHYGKKNTEEKIYLPPIPADEIRNPVVLRALSQARKVINGVVRRYGSPARIHIETAREVGKSFKDRKEIEKRQEENRKDREKAAAKFREYFPNFVGEPKSKDILKLRLYEQQHGKCLYSGKEINLGRLNEKGYVEIDHALPFSRTWDDSFNNKVLVLGSENQNKGNQTPYEYFNGKDNSREWQEFKARVETSRFPRSKKQRILLQKFDEDGFKERNLNDTRYVNRFLCQFVADRMRLTGKGKKRVFASNGQITNLLRGFWGLRKVRAENDRHHALDAVVVACSTVAMQQKITRFVRYKEMNAFDGKTIDKETGEVLHQKTHFPQPWEFFAQEVMIRVFGKPDGKPEFEEADTPEKLRTLLAEKLSSRPEAVHEYVTPLFVSRAPNRKMSGQGHMETVKSAKRLDEGVSVLRVPLTQLKLKDLEKMVNREREPKLYEALKARLEAHKDDPAKAFAEPFYKYDKAGNRTQQVKAVRVEQVQKTGVWVRNHNGIADNATMVRVDVFEKGDKYYLVPIYSWQVAKGILPDRAVVAYADEEDWTVIDESFRFKFVLYSNDLIKVQLKKDSFLGYFSGLDRATGAISLREHDLEKSKGKDGMHRIGVKTALSFQKYQIDEMGKEIRPCRLKKRPPVR

SEQ ID NO: 379 - RNA, 66 nt, synthetic construct
  misc_feature 1..66: note = Telomerase Ku Binding Motif oligonucleotide sequence
  source 1..66: mol_type = other RNA
ttcttgtcgtacttatagatcgctacgttatttcaattttgaaaatctgagtcctgggagtgcgga

SEQ ID NO: 380 - protein, 1094 aa, synthetic construct
  REGION 1..1094: note = Telomerase Ku Heterodimer polypeptide sequence
MSGWESYYKTEGDEEAEEEQEENLEASGDYKYSGRDSLIFLVDASKAMFESQSEDELTPFDMSIQCIQSVYISKIISSDRDLLAVVFYGTEKDKNSVNFKNIYVLQELDNPGAKRILELDQFKGQQGQKRFQDMMGHGSDYSLSEVLWVCANLFSDVQFKMSHKRIMLFTNEDNPHGNDSAKASRARTKAGDLRDTGIFLDLMHLKKPGGFDISLFYRDIISIAEDEDLRVHFEESSKLEDLLRKVRAKETRKRALSRLKLKLNKDIVISVGIYNLVQKALKPPPIKLYRETNEPVKTKTRTFNTSTGGLLLPSDTKRSQIYGSRQIILEKEETEELKRFDDPGLMLMGFKPLVLLKKHHYLRPSLFVYPEESLVIGSSTLFSALLIKCLEKEVAALCRYTPRRNIPPYFVALVPQEEELDDQKIQVTPPGFQLVFLPFADDKRKMPFTEKIMATPEQVGKMKAIVEKLRFTYRSDSFENPVLQQHFRNLEALALDLMEPEQAVDLTLPKVEAMNKRLGSLVDEFKELVYPPDYNPEGKVTKRKHDNEGSGSKRPKVEYSEEELKTHISKGTLGKFTVPMLKEACRAYGLKSGLKKQELLEALTKHFQDMVRSGNKAAVVLCMDVGFTMSNSIPGIESPFEQAKKVITMFVQRQVFAENKDEIALVLFGTDGTDNPLSGGDQYQNITVHRHLMLPDFDLLEDIESKIQPGSQQADFLDALIVSMDVIQHETIGKKFEKRHIEIFTDLSSRFSKSQLDIIIHSLKKCDISERHSIHWPCRLTIGSNLSIRIAAYKSILQERVKKTWTVVDAKTLKKEDIQKETVYCLNDDDETEVLKEDIIQGFRYGSDIVPFSKVDEEQMKYKSEGKCFSVLGFCKSSQVQRRFFMGNQVLKVFAARDDEAAAVALSSLIHALDDLDMVAIVRYAYDKRANPQVGVAFPHIKHNYECLVYVQLPFMEDLRQYMFSSLKNSKKYAPTEAQLNAVDALIDSMSLAKKDEKTDTLEDLFPTTKIPNPRFQRLFQCLLHRALHPREPLPPIQQHIWNMLNPPAEVTTKSQIPLSKIKTLFPLIEAKKKDQVTAQEIFQDNHEDGPTAK

SEQ ID NO: 381 - RNA, 10 nt, synthetic construct
  misc_feature 1..10: note = Telomerase Sm7 consensus site(single stranded) oligonucleotide sequence
  source 1..10: mol_type = other RNA
aatttttgga

SEQ ID NO: 382 - protein, 83 aa, synthetic construct
  REGION 1..83: note = MS2 coat protein polypeptide sequence
GSVIDVSSQRVNVQRPLDALGNSLNSPVIIKLKGDREFRGVLKSFDLHMNLVLNDAEELEDGEVTRRLGTVLIRGDNIVYISP

SEQ ID NO: 383 - RNA, 26 nt, synthetic construct
  misc_feature 1..26: note = PP7 phage operator stem loop oligonucleotide sequence
  source 1..26: mol_type = other RNA
ataaggagtttatatggaaaccctta

SEQ ID NO: 384 - protein, 128 aa, synthetic construct
  REGION 1..128: note = PP7 coat protein (PCP)polypeptide sequence
MSKTIVLSVGEATRTLTEIQSTADRQIFEEKVGPLVGRLRLTASLRQNGAKTAYRVNLKLDQADVVDCSTSVCGELPKVRYTQVWSHDVTIVANSTEASRKSLYDLTKSLVATSQVEDLVVNLVPLGR

SEQ ID NO: 385 - RNA, 19 nt, synthetic construct
  misc_feature 1..19: note = SfMu Com stem loop oligonucleotide sequence
  source 1..19: mol_type = other RNA
ctgaatgcctgcgagcatc

SEQ ID NO: 386 - protein, 62 aa, synthetic construct
  REGION 1..62: note = SfMu Com binding protein polypeptide sequence
MKSIRCKNCNKLLFKADSFDHIEIRCPRCKRHIIMLNACEHPTEKHCGKREKITHSDETVRY

SEQ ID NO: 387 - protein, 47 aa, synthetic construct
  REGION 1..47: note = leucine zipper polypeptide sequence
LEIRAAFLRQRNTALRTEVAELEQEVQRLENEVSQYETRYGPLGGGK

SEQ ID NO: 388 - protein, 47 aa, synthetic construct
  REGION 1..47: note = leucine zipper polypeptide sequence
LEIEAAFLERENTALETRVAELRQRVQRLRNRVSQYRTRYGPLGGGK

SEQ ID NO: 389 - DNA, 303 bp, synthetic construct
  source 1..303: mol_type = other DNA
tgcctgagctacgataccgagatcctgaccgtggaatacggcttcctgcctatcggcaagatcgtcgaggaacggatcgagtgcacagtgtacaccgtggataagaatggcttcgtgtacacccagcctatcgctcagtggcacaacagaggcgagcaagaggtgttcgagtactgcctggaagatggcagcatcatccgggccaccaaggaccacaagtttatgaccaccgacggccagatgctgcccatcgacgagatctttgagagaggcctggacctgaaacaggtggacggactgcct

SEQ ID NO: 390 - protein, 101 aa, synthetic construct; identical to SEQ ID NO: 375

SEQ ID NO: 391 - DNA, 264 bp, synthetic construct
  source 1..264: mol_type = other DNA
tgtctggacctcaagacccaagtgcagacacctcagggcatgaaagagattagcaatatccaggtgggcgacctggtcctgagcaacaccggctacaacgaggtgctgaacgtgttccctaagtccaagaagaaatcttataagatcaccctggaagatggcaaggaaatcatctgcagcgaggaacacctgttccccacccagaccggcgagatgaacatcagcggcggactgaaggagggcatgtgcctgtacgtgaaggag

SEQ ID NO: 392 - protein, 88 aa, synthetic construct
CLDLKTQVQTPQGMKEISNIQVGDLVLSNTGYNEVLNVFPKSKKKSYKITLEDGKEIICSEEHLFPTQTGEMNISGGLKEGMCLYVKE

SEQ ID NO: 393 - DNA, 267 bp, synthetic construct
  source 1..267: mol_type = other DNA
tgcctgagcctggacaccatggtggtgacaaacggcaaggccatcgagatcagagatgtgaaggtgggagattggctggaaagcgaatgtggcccagtgcaggttacagaggtgctgcctatcatcaagcagcctgtctttgagattgtgctgaaaagcggaaaaaagatccgggtgtccgctaatcacaagttccccaccaaggacggcctcaagaccatcaacagcggcctgaaggtgggcgacttcctgagaagcagagccaag

SEQ ID NO: 394 - protein, 89 aa, synthetic construct
CLSLDTMVVTNGKAIEIRDVKVGDWLESECGPVQVTEVLPIIKQPVFEIVLKSGKKIRVSANHKFPTKDGLKTINSGLKVGDFLRSRAK

SEQ ID NO: 395 - DNA, 303 bp, synthetic construct
  source 1..303: mol_type = other DNA
tgttttgtgcctggcaccctggtgaacacagagaatggcctgaagaaaatcgaggaaatcaaggtgggcgacaaggtgttcagccatacaggcaagctgcaggaggtggtggacaccctgatcttcgaccgggacgaggaaatcatctctatcaacggcattgattgcaccaagaaccacgagttctacgtgatcgataaggaaaacgctaatagagtgaacgaggacaacatccacctcttcgccagatgggtccacgccgaggaactggatatgaaaaagcacctgctgatcgagctggaa

SEQ ID NO: 396 - protein, 101 aa, synthetic construct
CFVPGTLVNTENGLKKIEEIKVGDKVFSHTGKLQEVVDTLIFDRDEEIISINGIDCTKNHEFYVIDKENANRVNEDNIHLFARWVHAEELDMKKHLLIELE

SEQ ID NO: 397 - DNA, 315 bp, synthetic construct
  source 1..315: mol_type = other DNA
tgcctggtgggctctagcgagattatcacaagaaactacggcaagaccaccatcaaggaagtggtcgagatcttcgacaacgacaagaatatccaggtgctggccttcaacacccacaccgataatatcgagtgggcccctatcaaggccgctcagctgaccagacctaacgccgagctggttgaactggaaatcgacaccctgcacggcgtgaaaacaatccggtgcacccctgaccaccccgtgtacaccaagaacagaggctacgtgcgggccgacgagctgacagatgatgacgagctcgtggtggctatc

SEQ ID NO: 398 - protein, 105 aa, synthetic construct
CLVGSSEIITRNYGKTTIKEVVEIFDNDKNIQVLAFNTHTDNIEWAPIKAAQLTRPNAELVELEIDTLHGVKTIRCTPDHPVYTKNRGYVRADELTDDDELVVAI

SEQ ID NO: 399 - DNA, 306 bp, synthetic construct
  source 1..306: mol_type = other DNA
tgcctgagctacgagacagagatcctgaccgtggaatatggcctgctgccaatcggaaagatcgtggaaaagcggatcgagtgcaccgtctacagcgtggacaacaacggaaatatctatacacagcctgtggcccaatggcacgaccggggcgaacaggaggtgtttgagtactgcctggaagatggttctctgattagagccaccaaggaccacaagttcatgaccgtcgacggccagatgctgcccatcgacgaaatcttcgagcgggaactcgacctgatgagagtggataacctgcccaat

SEQ ID NO: 400 - protein, 102 aa, synthetic construct; identical to SEQ ID NO: 371

SEQ ID NO: 401 - protein, 101 aa, synthetic construct; identical to SEQ ID NO: 375

SEQ ID NO: 402 - protein, 102 aa, synthetic construct; identical to SEQ ID NO: 371

SEQ ID NO: 403 - DNA, 279 bp, synthetic construct
  source 1..279: mol_type = other DNA
acaagaagcggatactgtctggacctcaagacccaagtgcagacacctcagggcatgaaagagattagcaatatccaggtgggcgacctggtcctgagcaacaccggctacaacgaggtgctgaacgtgttccctaagtccaagaagaaatcttataagatcaccctggaagatggcaaggaaatcatctgcagcgaggaacacctgttccccacccagaccggcgagatgaacatcagcggcggactgaaggagggcatgtgcctgtacgtgaaggag

SEQ ID NO: 404 - protein, 93 aa, synthetic construct
TRSGYCLDLKTQVQTPQGMKEISNIQVGDLVLSNTGYNEVLNVFPKSKKKSYKITLEDGKEIICSEEHLFPTQTGEMNISGGLKEGMCLYVKE

SEQ ID NO: 405 - DNA, 282 bp, synthetic construct
  source 1..282: mol_type = other DNA
tctcagctgaaccggtgcctgagcctggacaccatggtggtgacaaacggcaaggccatcgagatcagagatgtgaaggtgggagattggctggaaagcgaatgtggcccagtgcaggttacagaggtgctgcctatcatcaagcagcctgtctttgagattgtgctgaaaagcggaaaaaagatccgggtgtccgctaatcacaagttccccaccaaggacggcctcaagaccatcaacagcggcctgaaggtgggcgacttcctgagaagcagagccaag

SEQ ID NO: 406 - protein, 94 aa, synthetic construct
SQLNRCLSLDTMVVTNGKAIEIRDVKVGDWLESECGPVQVTEVLPIIKQPVFEIVLKSGKKIRVSANHKFPTKDGLKTINSGLKVGDFLRSRAK

SEQ ID NO: 407 - DNA, 318 bp, synthetic construct
  source 1..318: mol_type = other DNA
ggcatcggcggaggatgttttgtgcctggcaccctggtgaacacagagaatggcctgaagaaaatcgaggaaatcaaggtgggcgacaaggtgttcagccatacaggcaagctgcaggaggtggtggacaccctgatcttcgaccgggacgaggaaatcatctctatcaacggcattgattgcaccaagaaccacgagttctacgtgatcgataaggaaaacgctaatagagtgaacgaggacaacatccacctcttcgccagatgggtccacgccgaggaactggatatgaaaaagcacctgctgatcgagctggaa

SEQ ID NO: 408 - protein, 106 aa, synthetic construct
GIGGGCFVPGTLVNTENGLKKIEEIKVGDKVFSHTGKLQEVVDTLIFDRDEEIISINGIDCTKNHEFYVIDKENANRVNEDNIHLFARWVHAEELDMKKHLLIELE

SEQ ID NO: 409 - DNA, 330 bp, synthetic construct
  source 1..330: mol_type = other DNA
ggaacaaacccatgttgcctggtgggctctagcgagattatcacaagaaactacggcaagaccaccatcaaggaagtggtcgagatcttcgacaacgacaagaatatccaggtgctggccttcaacacccacaccgataatatcgagtgggcccctatcaaggccgctcagctgaccagacctaacgccgagctggttgaactggaaatcgacaccctgcacggcgtgaaaacaatccggtgcacccctgaccaccccgtgtacaccaagaacagaggctacgtgcgggccgacgagctgacagatgatgacgagctcgtggtggctatc

SEQ ID NO: 410 - protein, 110 aa, synthetic construct
GTNPCCLVGSSEIITRNYGKTTIKEVVEIFDNDKNIQVLAFNTHTDNIEWAPIKAAQLTRPNAELVELEIDTLHGVKTIRCTPDHPVYTKNRGYVRADELTDDDELVVAI

SEQ ID NO: 411 - DNA, 105 bp, synthetic construct
  source 1..105: mol_type = other DNA
gtcaagatcatcagcagaaagagcctgggcacccagaacgtgtacgatatcggagtgggcgagccccacaactttctgctcaagaatggcctggtggccagcaac

SEQ ID NO: 412 - protein, 35 aa, synthetic construct
VKIISRKSLGTQNVYDIGVGEPHNFLLKNGLVASN

SEQ ID NO: 413 - DNA, 114 bp, synthetic construct
  source 1..114: mol_type = other DNA
atgatgctgaaaaagatcctgaagatcgaggaactggatgagagagagctgatcgacatcgaagtgtctggcaatcacctgttctacgccaacgacatcctgacccacaacagc

SEQ ID NO: 414 - protein, 38 aa, synthetic construct
MMLKKILKIEELDERELIDIEVSGNHLFYANDILTHNS

SEQ ID NO: 415 - DNA, 138 bp, synthetic construct
  source 1..138: mol_type = other DNA
atgtgcgaaatcttcgagaacgagattgattgggacgaaatcgcctctatcgagtacgtgggcgtggaagagacaatcgacatcaacgtgaccaacgacagactgtttttcgccaatggcatcctgacccacaacagc

SEQ ID NO: 416 - protein, 46 aa, synthetic construct
MCEIFENEIDWDEIASIEYVGVEETIDINVTNDRLFFANGILTHNS

SEQ ID NO: 417 - DNA, 123 bp, synthetic construct
  source 1..123: mol_type = other DNA
atgaaattcaagctgaaggaaatcaccagcatcgagacaaagcactacaagggcaaggtgcacgatctgaccgtgaaccaggaccacagctacaacgtcagaggcaccgtggtgcataattct

SEQ ID NO: 418 - protein, 41 aa, synthetic construct
MKFKLKEITSIETKHYKGKVHDLTVNQDHSYNVRGTVVHNS

SEQ ID NO: 419 - DNA, 123 bp, synthetic construct
  source 1..123: mol_type = other DNA
atggaagccaagacctacatcggcaagctgaaatctagaaagatcgtgtccaacgaggatacatacgacatccagaccagcacccacaatttcttcgccaacgacatcctggtgcacaacagc

SEQ ID NO: 420 - protein, 41 aa, synthetic construct
MEAKTYIGKLKSRKIVSNEDTYDIQTSTHNFFANDILVHNS

SEQ ID NO: 421 - DNA, 108 bp, synthetic construct
  source 1..108: mol_type = other DNA
atgatcaagatcgccacaagaaagtacctgggcaagcagaacgtgtacgacatcggcgtggagagagaccacaacttcgccctgaagaacggctttatcgcctctaat

SEQ ID NO: 422 - protein, 36 aa, synthetic construct; identical to SEQ ID NO: 373

SEQ ID NO: 423 - protein, 36 aa, synthetic construct
MVKIISRKSLGTQNVYDIGVGEPHNFLLKNGLVASN

SEQ ID NO: 424 - protein, 35 aa, synthetic construct
IKIATRKYLGKQNVYDIGVERDHNFALKNGFIASN

SEQ ID NO: 425 - DNA, 88 bp, synthetic construct
  source 1..88: mol_type = other DNA; note = SaCas9 scaffold sequence
gttttagtactctgtaatgaaaattacagaatctactaaaacaaggcaaaatgccgtgtttatctcgtcaacttgttggcgagatttt

SEQ ID NO: 426 - protein, 294 aa, Homo sapiens
MAMSSGGSGGGVPEQEDSVLFRRGTGQSDDSDIWDDTALIKAYDKAVASFKHALKNGDICETSGKPKTTPKRKPAKKNKSQKKNTAASLQQWKVGDKCSAIWSEDGCIYPATIASIDFKRETCVVVYTGYGNREEQNLSDLLSPICEVANNIEQNAQENENESQVSTDESENSRSPGNKSDNIKPKSAPWNSFLPPPPPMPGPRLGPGKPGLKFNGPPPPPPPPPPHLLSCWLPPFPSGPPIIPPPPPICPDSLDDADALGSMLISWYMSGYHTGYYMGFRQNQKEGRCSHSLN

SEQ ID NO: 427 - DNA, 28913 bp, Homo sapiens
  source 1..28913: mol_type = genomic DNA
agaagccccgggcggcggaagtcgtcactcttaagaagggacggggccccacgctgcgcacccgcgggtttgctatggcgatgagcagcggcggcagtggtggcggcgtcccggagcaggaggattccgtgctgttccggcgcggcacaggccaggtgaggtcgcagccagtgcagtctccctattagcgctctcagcacccttcttccggcccaactctccttccgcagcctcgggacagcatcaagtcgatccgctcactggagttgtggtccgcgtttttctacgtcttttcccactccgttccctgcgaaccacatccgcaagctccttcctcgagcagtttgggctccttgatagcgttgagtggaggccctgccgcgacttggcagtagcttattttgttcactcctctctggctggtgtgggggaggtgggggcattaggccagggtgaagcaggggaaccacttaggagtctgttaagatgatctgaacttcagaacaagatgttattaacagagtgaaagtatttggattctgggtatattttgaaatcggaggcaacaggtttttcagatagattcgataacggaggttatcctgaatagttgaaaagataaagttgccttttgctgaggtgggaaagagaagattgccagtagagcaggtttctcaggagttcagtcttgggcatagcatggtaggggtgaatttggctggagtgagttggagagtaggagaagagaaatccaaggcaacatttgaccagcctgggcaacatagtgtgactccgagtctgcaaaaattagacgggtgttgtggtgcgcgtctgtggtctcagctacctggaaggttcaggccttggaaggctcagggaggtggaggctgcagtgatctgtgattgcgcctctgcactccagcctgggcgacagagccagaccctgtcttaaaacaaaataaacggccgggcgcggtggctcaagcctgtaatcccagcactttgggaggccgaggcggccggatcacaaggtcaggagatcgagaccatcctggctaacacggtgaaaccccgtctctactacaaatacaaaaaattagccgggcgtggtgacgggcgcctgtagtcccagctactcgggaggctgaggcaggagaatgtcatgaagccgggaggcggagcttgcagtgagccgagatcgcgccactgcactccagcctgggcgatagagcaagactccgtctcaaataaataaataaataaataaataaataataaaaacatcggtaggcatatttcaaggaattctatttaaaaaaaatttttttagagacaagttcgctctctgtggcccaggctggagtacagtggcatgatcctagcccatggcagcgttgatctcttggcctcaagcgaccctcctttggagtcgctgggcctaaaggagtgagccaccacgaaattttattataaatggagggtagagaaattgggcaataaatggagggggaagtgagttaagaggaattttaattatgtgtgtgtggttttaaaagaggggggtcttgctctgttgcccaggctgctggggtgccagtggcgcaatcatgaatcactacagccttggactcctggcctcaagctatcctcccacctctgcctcccaaagtactgggattactagtgtgagccactgcactaagataggagcaacatgtttcagcatgtttgtgggttgataggaaagatgagaatgggaaagttgatgtcggaaagaagacaatggctagagcaatgtcctagagtaggtaagaagggatggatttggcctttgttggaaacattagcggttcttttggtgacagctatatagttaacacatctatgatacgtgaatgggcagataggatggcaggagattttgaaagttctcttgattcttactgttctcttagtgaaagaagcaaggttatcagctagaagctgggatgggagaggaaagagaagatgggaagtagatagttctttagaagagtgggcaagggttggactagggaagtttagtggaaatattgctaggcaacataaagagcctacttgagattcgtggtcatgagttgaaggagaccagacagcaagattgtgtatgagggcacccacagagtaaatggagagttgaaattaatgcagttgtgattttaccacgtggatatgaagaagtgagggggagaagtacaaaggagttctcttaatgattgaccatggaatttaagctggctaagaaaggaagtgagaggccgggcgcggtggctcacgcctgtaatcccagcactttgggagactgaggtgggtggattacctgaggtcaggagtttgagaccaacctggccgatatggcgaaaccccatctctaataaaaatacagaaaaattagccgggaatggtggcaggtgcctgtaatcccagctactcaagaggctgtggcaggagtatcccttggacccaggaggtggaggttgcagtgagccgagatcacgccactgtactccagcctggacgatatagtgagacttcacctcaaaaaaaaaaaaaaaagaaaggaagtgaggattttaagaccctgagagacagtttaaaaagtgggaggatcggccgggcgctgtggctgacacctgtaatcccagcactttgggaggccgagttgggcagatcacaaggtcaggagttcgagaccagcctggccaatatggtgaaaccttgtctctactaaaaatacaaaaattagccgggcatggtgtcacgtgtctataatcccagctactcgggaggctgaggcagaaaaattgcttgaacctgggaggcagaggttgcagacagctgagatcactccattgcactccagcctgggcaacaagagcaaaactttgtctttaaaaaaaaaaaaaaaaaaagaatacaaaaattagccgggcgtggtggcgcgtgcctataatcccagctacttgggaggctgaggcaggagaatcagttgaacacgggaggcgaggtttgcagtgagccgagattgcgccactgcactccagcctgggcgacagagcaggactcctcttggaaaaaaaaaattagctgggcatggtggcaggtgcctgtagtctcagctactagggaggctgaggcaggaaaatcacttgaacccgggatgtggagtttgcagtgacccgagatcgtgccactgtactccatcctgggcgacaaaatgagactctgcctcaaaaaaaaaaaaaaaaaaaaaaaaagtgggaggatcaatgtactgccagtcctaatgaagtggaatgattgtccccatcaaatcactagtaggagtaagttgcagagcctagaaggtgatggttaagagagtgggattcttgaaactgcatttatggagaggttgtggttattggttataataaataaatacagttgaagtgagtgagtagctgagatttggggatgtatcagttcattcttacactgctacaaagacatacctgagaccaggtatttataaagataagaggtttaatcagctcacagttctgctgcctgtacaggcttctcttgtggaggcctaaggaaacttacagtcatggtggaaggtgaaggggaaacaagcacagtcttcacatggccagcaggagagagagagaagggggaagtgctacatactttaaaacaaccagatcttgtgagaacgcttatcaggaaacagcacttggggatggtgctaaatcattagaaatcacccccatgatccagtcgcctcctaccatgcccacctccaacactggggatcacaattcagcatgagatttgggtaggaacacagagctgcaccacatcagaggatgtacaagattgtggtggagaggagtttagagacctgcaaatatagggtaattgaagggatcatctacatggatatttaaatcaccaaaaattatgacaggagtagtgttggagagagaactgcgatgtaaacattaaggaatgaggaagagtgactcggtaggctgtaggtgactgcaataggaaacgataatagactgtgagtctggtgacaagattttccttctttctttttttccccccccccgagacagggcctctttttgttgcccaggtgggagtgcagtggcgcgatcacggctcactacaacctcctcccaagctcaagggattctcccacttcagcctctcaagtagctggaactacaggtgctgaccaccatgcctggctactttttgtcaggattttcaaggctgggaattttgagaggggaatggaggagaataatctgaaagtgcaagtaaggagcagggaagatttcttttttcttttttttttttttttttgagtcggagtctggctcagtcgcccaggctggagtgcagtggcgagatctccgctcactgcaagctccgcctcccgtgttcacgccattctcctccttcagcctcccgagtagctgggactacaggcgcccgccaccacgcccagctaattgtttttttgtatttttagtagagacggggtttcaccgtgttagccaggatggtctcaatctcctgactttgtgatccgcccaccccggcctcccaaagcgcttgggattacaggcgtgagccaccgcgccagccagagcagggaagatttcttccccacatctccagtaggtacagtgatatgaagtgtgtggaggagaaaagaggaaacatctatcatttgagatggctgcgaaaggaaaaggcatcctcagggagctagattttacttagagcaagaaatgaagggatgattcagaggttaaaagagtggattttatgaattactcaagggagcacagtggaagtttcaggaagtggtaggagaaggtagaagatggcagggtgttgggaataatttgagaaatctgagctactggaaatgactgagaatcagatataaaggcagtcctggtggtccgttctggctgccgttgctgtgtaacgaatctgccaaaacttagtggcttgaaacaacaaagaacattttattatctctcattgtttctgtgggttaggaatttgtgagagccgtgctgggcagttttcgtgcggctgtctcgtggttgcacctacatagttgctagagctacagtagctggggactgagcagctagggattggcaggctatctctttttttcatgtagtctcatgaagatttctttatgtggtttcaatgtgtgggctggtttggatttccttatagcatggtggcctcagttggattgctgttttgtgatccttttcatccctccttgtcctgtccccagacaaccactgatctactttctgtcaccatagattagcctgcatttttaagaatttttataaacgtggaatgatagagtaccttttttgtcacgtttcttttatttatcatagctattttgattttcatccattttattgctgagtagtatcccattgcatgtatatactatactgtattcattcgcttgcttgtgaacatttgggctttttccagtttgggactgttaacaagtagagccactatgaatattagtgtataagacttcatatagccaaggctggcagatcgcttgagcccaggagtttgagaccagcctgggaaacatggtgaaacctctatttttattttaaaatcaaaaattaaaaattttctataaaaaattttaaagaagactttgtatagacatacgctttcatttttcttgagtgaatacttaggtctcagggtagatgtattttaagtctttaaggagctgtcaaactcttcctcaaagtggtggttgtaccatgttactttttaatataacagagattaattgagcaaagaaaaattcaaaagttggacagcccccacaactaaataggttcagaacagctcccccattttgcattttgaccagcaatgtatgaaagttccatttgctcagtgtccctgcaaacacctggtatggtcagtctttttaattttaggcattataatagatatagtggcttcttgtgattttaattagcatttcctaatgaccagtgctgctgttgatcatttcatgagtgtatttgccatccgtatatcttttttggtgaagtgtctattcaaatcatttgggttttttttttttttgttttttttttttggagacagtgtctcactctgtcacccaggctgttgtgcagtggtgcaatcacacagcctactgcagcctccacctcctgcgctcagtcttcttgtctcagccttctgagtagctgaaattacgagcacacgccacaatgcctggctaattttttaaaattttgtagaaacaaggtctcattatgttgcctgggcttgtcgtgaactcctgggctcaagcaatcttcctgcctcagcctcccaaagattgggattgcaagtatgagccactgcacccggccaacttacccatcttttaattgaatttttttgttgttgaggtttgagagttcttcatgtttgctgggtacaatatctttatcagataggtaacttgcatgtattttctcccggtttacactttggtttttcattttgttaacaacgtctttttaagaacagaaaatcttaattttgctgaaatctaatttttcagttttttctttgatggttttgagagaggaggtaaaaaaagactaggtaagccgatagttagacagagtcctcggtagaacttcccttctaacaaaaagcagcccaagaaatcacttctcttctaacaaggagcagcctggaagatcgggctgtaaacatgtataaggaagcagctctggcacagagggggagcttcctgggtaatcagcaagcttcacatacgtaaggtgggtatgtgaagtaaacacagtatgtgaagtaaacacagtggaccttagtacatactcagataaggaagctggaagcttgcatgttgtgagttgttggggttgcctgcagctgcacggagagaaaggggtacctggggccaggcatgtccaccatggtggctccacctccccttatttagcacatgcacaataggaaagagataagcaatgtggagtagctcaggccaaggacctgcctgcataataaaaggttggggtgggggatgccagagattcacgctctgtgcagatggcaacacctggtcctaactggttttttgctccctatgtgtagataagctacccccttcccattagctcatttataaaaatgcttgcatttcactgtggaatgggaactcttttcaggacctctctctgcaggagagagctagtctctttcttttgcctattaaacttctgctctagcctcacacccttggtgtgtcagcgtccttgatttcctcagcgtgagaccaagaacctcgggtgccaccccaggcaacaaggccatttcagtttgttcttttgttataggcaatccatgatcacagatttttctctcttttttttttttacacagtttagagttttagttttacacttaggtctgtaatccattttgtattaattcttatatgtggctcagtgtaggtggaaatttggtttgtttttgcataaggatttccaatagttttaccaccatttcttgaaactactatgctttctctattaaaccacatttgtaactttagttaaaatcagtcacatatatcacagggctatttctgactctcaattctgttacattgtctattagtgtatattgatgtcagtactacacttttaattactattgcttcagggtatgtcttgtaaaccaaaaataaaattataggccccccccgcccctgcacaaccaactgaatggacccatcctctcagccaagggcattccaaaattaacctgaaaaactagttcaagccatgatgggaagggggagttggacatgtctcatcacaccctactaccttttggaattactgatagaacagactcttaaagtctgaaaagaaacatttacaacctaccctctctgaagcctgctacctgggagcttcatctgcatgataaaaccttggtctccacaaccccttatggtaacccaaacattcctttctgttgataataactctttcaactagttgccaattagaaaatctttaaatcttcctatgacctagaaacctccctacccccactttgagttgtcctgcctttcctgacagaactcatgtacatcttacatatattgattgatgcctcatgtctccctaaaatgtataaaacaaagctgtaccccaccaccttggggacatgtcatcaggacctcctgtggctgtgtcataggagcgtctttaactttggcaaaataaactttctaaattgattgaaacctgtcttagctacttctggtttacagtcttaaagttagataatgtaaattgtccagctttggtttatttttgtccttagtagttccatataaattttagaatcagcttttcaatttaatacactactttcctcttagatccacaattaaatatatttgatgctaacaattctgttttatgtttttcgttttttttttttgagacaagagtttcgctcttgttgcccaggctggagtgcagtggcgcgatcttggctcaccacaacctccacctcccaggttcaagcaattcttctgcctcagcctcccgagtagctgggattacaggcatgcgccaccacgcccggctaattttgtatttttagtagagacggggtttcaccatgttgatcaggctggtcttgaactcctgacctcaggtgatccacccacctcggcctcccaaagtgttgggattacaggcgtgaaccaccatgcctggccagttctgttatttttaaaacccaagtttccctggtcatatcttggttggatgaagcgtattttcaatagattaccctggaaaggctagtgagtacggtattcttctacattttagacttttcttagtcttgctacttcaaggacagctaggctgcatataaaattcttggctcatactttttccccataaatttctatgagaaagtctaatgataactgattttctttattttgtaacttagtctttttgcttagaggctctctgaggatgggagggggttcttcctcccatccctaggaatttttcttttttttaaattcctaatcactagaccaccaggaagattgtttgttttgttttgtttttattcttcagggaccccatttatacatacgttaaataaatactgtttgccaatgtatcaaccattttgcttcttatttatttttgttcctttggttctttttcatggctttgctttggtgctccttagattttcagtcagatgtatttgtccttgggtaccttgtaatcagtattaccttttcttctgtcgctttgttttctgttcgttttgaaattacttgtttcctggtctggcaataacagttgagatatgaggagtttgagctgccatctgtctatgtatcttgctttaagactgcactcttctattgatatcactggccttgattttgtgatttctttatttcttcaggaccacccttcattttctactgtttgcttcctttttttttgagatggagtctcactctgtcactcaggctggagtgcagtgatcttggctcattgcaacctctgcctcccgggttccagcaattctcctgcctcagcctcccaagtatctgggactacaggtgtgcaccaccatgcccggctaagttttgtatttttaatagagacggggttttgccacattggcaggctggtctcaaactcctgatgtcaagtgatccacccaccccacccacctctgcatcccaaagtgctgggattacaggaatgagctgccgtgcccagcctcccccctacccccctttttttctttcgagacagagattataggtgtgagccactggacccagcctgtttttattccttttaccaaatctccaaggaatatcttcccttccaagtgcgaatgtaaccttaagtcagttaacctctttgtgattacttttcttatctgcaaagtgacttaatgatcttaagtactttttttttttgagacagggtctcactgtcaccctggctggagtgcagtggcacgatctctgatctccactcactgcaatctcctcttccctggttcaagcggccctcccaccttagccttctgggtagctgggactacagatgtgaaccaccacgcccagctaatttttgtactttttgtagagatggggttttgccatgttgcccaggctgggattattaagtactttttatcatacagcaagattgacattttatattggaatacatttgtctctatataacggagattaacaggaaaatgacaagcctgggtgcggtggctcatgcctgtaatcccagcactttgggaggctgaggtgggaggatcacttgaggtcaggagttcgagaccagttttgccaagatgatgaaagcccatgtctactaaaaatacaaaaattagcccagcttgatggtgggcgcctataatcccagctatttgagagactgaggcaggagaatcacttgaacctgggcggcagaggttgcagtgagccgagatcatgccactgcactccagcctgggtggcatagcgagactcttgtctcaagagaaaacaaaacaaaacaaaaaaaaaacaggaaaatgacaaaaagtaatattacaactcagtgaattttataacaaacttttttggaattcattgactaatactataccaaatccaaaatactctctagtataccaaatccaactctaccctatagtataaattggattctatttggacttgtctcactaatccctcatacagtgtgttttattttttattgaagtaaaaaaatttgtcattttaaccatttttaagtatatagttcagtaatattaagtatgttcatgttgttgcgcaatagatcttcggaagtttttcgtcttgcaacctgaaactctacccattagcaaattcccatttctccttacacttagcccttggtaatcatcattcttttttttttttttttgagatggagttttactcttgttgcccaggctggagtgcaatggtgcaatctcgactcaccacaacctccgcctcccaggttcaagcaattctacctcagcctcccgagtagctgggattacagtcatgcaccaccacgcccggctaattttgtatttttagtagagaaggggtttctccatgttgaggctggtctcgaactcctgacctcaggtgatctgcccacctcggcctcccaaagtgctgggattacaggcgtgagccactgcgcctggcccattctttctaattctataaatttgactacttagttaccttacataaataaattcttatagttagtgttatttttgcttccatgccttttttgttgttgttcatgctcttacttggaatgcgttctattttgtctacctatgcacatcctgttgggttttttttttttttgggggttttttttgtttttttttgtttttttttcccagacaaggtctcaatttgttacccaggctggagtgcagcggcgccatctccactcactgcatcctcaacttcctgggcccaggtgatcctctcgcctcagcccctgcaggtagctgggactataggcatgtgccaccatgcccagctaaatttggtttttttgtttgtttgtttttgagacagagtctcactctgtcacccaggctggagtgcagtggcacaatctcagctcactgcaatctctgccgcccgggttcaagtgattctcctgcctcagcctcccaagcagctgggattacaggtgactgccaccacgccagctaagttttgtagttttagtagagatggggtttcaccttgttggccatgctggtctcgaactcctgacctcgtgatctgcctgcttctgcctcccaaagtgctggaattacaggcatgagccaccacgcccggccagaatttttgtatttttagtagacacaaggttcttaccctgttgcctaggctggtctggaagtcctggactcaagcaattcacctgccttggcctcccaaaatgctgggattacaagccaccatgcccggcctaaatcctgttgttttgttttgttttattttgttttgttttgttttgtttgttttttgagacagagtctcgctatgtctctcaggctgtagtgcagtggcgcgatcttggctcactgccacctctgcctcccaggttcaagtgattctcctgcctcagcctcccaagtagctgggattacaggcatgtgctactatgtccggctaatttttgtatttttagtagagacagggtttcaccatgttggccaggctggtctcgaactcctgacctcgtgatccacccacctcggccacccaaagtgctgggattacaggcgtgagtggtttttatttcttaggccggtttcctccatatgatcttgcagtagacattaatttctttcctttttaattaaaatactgtttgtatttcacattttgatgtttgttaagatttgttttatattgttttttgttttgtcttgtgtgatagtcttaaatccctagttagataataactggagagtaccatgtttctatatatctctcagtgacttgcacagtgctagcagatagtgctaaaaaattatttattattattattattttgttattgttgttgttgttgttagacagggtcttcctctgtcacccaggctagagggcaatgggatgatcatagcttactgcagcctccaacaactgggctcatgtaattctcctgcctcagcttcccaagtagctgggattacaggcatgagccaccatgtctggacaaaaatatttccaggtgcagtggctcatgcctgtaattcccacacttgggaggccgagcgaggctggaggatcacttgagcctaggagttcaagaccagcttggctaagatggcgagaccccgtccctacaaaaaattttaaaaactagccaggcatggtggcatgcacctatattcccaactactcagtgggctgaggtgggagggtcatttgaacacaggaatttgaggggagaaaaaaagaagagagaaagagaagtgaaggaaggaagaaaggaaggagggagggagagaagaaagaaacgaaagaaaggaaaagaaaaggaaggaaagaaaattggtaccaggaaagcaggaaagggaaatggaagtaaaaaaataataataataataaaatgaaaattggttagtcactattaacaatttgtatccttataatctggaaacattataatttcaaaagaaaaaatattctttggatcataggttctgaggtcagaacagcattcccgtagtctagatgaagtcaagttttatctgatcttaattgaaataaatatagctggccttgaacaaatctactcatggtatgtggataggaattaaattgtaggggcattcacttgatggcattcattcttagaacatttacctatgtctagcttttggagtaaagtcacataacctctaaccaggtaagtttcctgtggctttatttaggattttaaatactcattttcagtgtaattttgttatgtgtggattaagatgactcttggtactaacatacattttctgattaaacctatctgaacatgagttgtttttatttcttaccctttccagagcgatgattctgacatttgggatgatacagcactgataaaagcatatgataaagctgtggcttcatttaaggtatgaaatgcttgcttagtcgttttcttattttctcgttattcatttggaaaggaattgataacatacgataaagtgttaaagtacatgttattcagttttcattttgaagattagatggtagtatgagttagttaaatcaggtgatatcctcctttagaagttgatagcctatatatgtcatcctttgtggaggcaatttaaataaaatttaaaacatttattcctggctgggtatggtggctcactcctgtaatcccagcactttgagaggctgaggcgggtggatcacctgaggtcaggagtttgagaccagcctggccaacatggtgaaaccccgtctttactaaaaatacaaaaattagccaagcatggtggcacgtgcctgtaatcccagctgcttgggacactgaggcaggagaattgcttgaacctggggggcagaggttgcaatgattgcaccactgcactccagcctgggcgatagagtgagactccatctcagaaaacgaacaaacaatgtattccttttagtatttttacattgtatcaaactatggaagtcctctaattgagattaataagaaaaagacaatctgaattataattttaaacatttaacaagcatgtagtaaaataatgatgaagataaatagcattagtacagcaattaatatttgtagcatgctgacagtgctctgtgtgcgtttcatatattaaattactctaatcatcccaaatcctgtaagttgggtatcaattcaagtgttcctattgggtaggaatatacagttcttttaggaaatgtagtatggttctgtgtctcaaacaggacacttacacagttggccaacatcatcaccttctccattctctgagatgtttagtcttactgagcactaaatatgggtcatcaatagtccagactaccttgagcaaacaatagtccagactaccttgagcaaacagagcatatactcatacagtgtataaagagcaccaagcatacagatttcatgtctttctcatagttactcttgtaacatgagctaaagatcagacctctatgtcacctttgtaactgatttctagatttttttttttttttgagatggggtcttgccctgtcacccaggctggagtgtagtggcgtgatcatgcctcattggagccttcaactcatgagctcaaacaatcctcctacctcagcttcctgagtagttgggaccacaggtgtgtgccaccacacccagctcatttttgtattctttgtagagatgcagtctcaccctgttgcccacgctggcctggaactcctgagctcaaaagatccctccgccttgaccttccaaagtgctgggattacaagcatgaaccactgcacccggcctagatttttaaatgtgctttccagtatacactgaaactagaagtcgactaaagaattaccaagagaattctataaaatagagattgaaatggggctcgatgtgggatgggttggtgatattgcagggagaagtaatctgagtaaaggaggaaaagaactgatttgggaaaacgatagttttagtagtgagtttgagtatgaattaagttgagattgaatttgaattaagttgaggttgaatatgaattaagttgaggttgagtttgaggtatgaattaagatgtgaaattgatcattggaaatgttagattgagaaaagtcacagctggattaatagcttcagaagtgtgtttgcagacagttgcaactaaagtaataagaatagatggccttggccgggcgcggtggctcacgcctgtaatcccagtactttgggaggctgaggcgagcaaatcacgaggtcaggagttcaagaccagcctggcccacatggtgaaaccccgtctttattaaaaatacaaaaattagctgtgcacagtggtgcacgcctgtaatcccagctactcgggaggctgagacaggagaatcgcttgaacctgggaggtggaggttgcagtgagctgagatcagtgtgactgcactccagcccggtgacagagtgagactctgtgtaaaaaaataaaataaataaaataatggccgtaagcaagtaaagaaggatggccagctcttattgggaatgcctaaatctaaggcttgatcagaagtaatgaaaccgttggggccctacattgctatgacatccaaagggccatgaatatcaggaagaaagataattaacagggtctaatgttacagagaggttgagagcaaggagatttgattaaaagggtctttagagctgatgtcaggtgtatgatgcctttaagagcagtttttatagtgcagggggtggtcaaaagagaaaataggtgctttctgaggtgacggagccttgagactagcttatagtagtaactgggttatgtcgtgacttttattctgtgcaccaccctgtaacatgtacatttttattcctattttcgtagcatgctctaaagaatggtgacatttgtgaaacttcgggtaaaccaaaaaccacacctaaaagaaaacctgctaagaagaataaaagccaaaagaagaatactgcagcttccttacaacaggttattttaaaatgttgagatttaacttcaaaggatgtctcattagtccttatttaatagtgtaaaatgtctttaacttaagtgattagtacagtgtttctattgacatatacttatacaacttcaaaaacaactattaaattttctgttatttaggaacatgcatattagtcatgaaagtataaagaattagatgggaatgataaatgctaaaatcaggacatgtgttccatttgtgaatggaaggcagggagaaggtgccgtttggaaggagtacccaagagccgtaagctgaattggcagtgttttacatcttaagctgagagatagatttttttttcccctttttctttaaaaactctaaaactgttaattccaaggaacccagaagtctaggtagattatttctgctagttaaaagcagtagtcctgaaagctgaatattttggtgtcttttgagccaactttagtttcatcattaccaagggggaagagagctaacagttgatgagcacttgctctaggccagtccagagtgctgggcaccatacgcattttatctccctcccgctattcacaacaaatatgggaggtagtttatattatagccatctaataagatggggaaactaagactcaaagagattcagaaacttgtccatgattataaatgtaagagagttggaattcagatttatgtatttagaccccaagcctttctcattacatcattttgccttccaaatctctaccctctatccttcacctccccactgatcaaaacgagatgatagtttgccctcttcaaaagaaatgtgtgcatgtatatatctttgatttcttttgtagtggaaagttggggacaaatgttctgccatttggtcagaagacggttgcatttacccagctaccattgcttcaattgattttaagagagaaacctgtgttgtggtttacactggatatggaaatagagaggagcaaaatctgtccgatctactttccccaatctgtgaagtagctaataatatagaacaaaatgctcaagaggtaaggatacaaaaaaaaaaaaattcaatttctggaagcagagactagatgagaaactgttaaacagtatacacagttgtcagtttgatccaccgaggcattaattttttcttaatcacacccttataacaaaaacctgcatattttttctttttaaagaatgaaaatgaaagccaagtttcaacagatgaaagtgagaactccaggtctcctggaaataaatcagataacatcaagcccaaatctgctccatggaactcttttctccctccaccaccccccatgccagggccaagactgggaccaggaaaggtaaaccttctatgaaagttttccagaaaatagttaatgtcgggacatttaacctctctgttaactaatttgtagctctcccatgaaacttttgtagcttaaatacacaagaattttttgaaaaggaaataagataatgatgcaaaatagttaattttttaaaaaaatgttagacactgcagtggatgcaacaaaatactttatatgaaagatttatccagttaacttttgtggagtattaggtattagactaataattagcacacttacttaagttagaaagtataataatgcgccggacgcggtagctcacgcctgtaatcccagcactttgggaggccaaggtgggcggatcacaaggtcaggagatcgagaccatcctggctaacacggtgaaaccccatctctactgaaaatacaaaaaaatttgccgggcgtgatggcgggcacctgtagtcccagctactcgggaggctgaggcaggaggatggtgtgaaccccggaggcagagcttgcagtgagtcaagatcgtgccactgcactccaacctgggcgacagaatgagactccatctcaaacaaaaaaacaaaacaaaacaaaaaaaagtgtaataataatttatcattagctggatgatatgctgttgtttcccatgtcacctgtataagatatgtaaaataagaacacattatttacatctaatatagataaaatcctgaggcgctctcagattgttttgtagagttcaaatgtaaatattgttttcatttatggtccttttggttataagtaacagaaatcaactctaaaaagatttttattataggttagattatgtcatggaaccttaaggcttgtccctttctagttcttttgtgtaaagcggtgatttcttccatggagggaatggtatttaggcaattttttttttttttcgagatggagtcttgctctgtcgctcaggctggagtgcagtggcaccatttcagctcactgcaacttccacctcctgggttcaagtgattctcctgcttcagcctcccaagtagctgagattacaggcacccgccaccacacccggcttattttgtatttttagtagagatggggtttcaccatgttggccaggctggtcttgaactcctgacctcaagtgatctccccaccttggccttccaaagtgctaggattacaggcgcctagcctaggcagtcattttcaaaaaacaagcatgactcaccaaaagttttaagattttctgtgataatgttcttattgaggcttacattatattacagtttcttgaatctaaaatgatgtaccctcttaggatatatacatcatgcttcattggtctcagggggctgatttttataaggagagatttgctagttttcacaatatgtcctctaagttggcatgtatagctaaacaggctttcataaaaatatacaatttagttaatgaaatttgggatatagtcttttatgattgaaataattttgctaaatagactgtctctgatttattaggtaatcaccactcttattttgttttacttccttaatgtctacatagaaaggaaatgagaaaaatccagaggttgtcatttgacttatgagtctgtttgacttcaggatttggtacatgaaatttcacttaatctttttgatatgtataaaacaaatattctgggtaattatttttatccttttggttttgagtcctttttattcctatcatattgaaattggtaagttaattttcctttgaaatattccttatagccaggtctaaaattcaatggcccaccaccgccaccgccaccaccaccaccccacttactatcatgctggctgcctccatttccttctggaccaccagtaagtaaaaaagagtataggttagattttgctttcacatacaatttgataattagcagaatagaggattgtaaaatgtcattgtagaacatcccttgggccagattctaatgggtagaaatttgaactaaacctctgggttttgtttgtttttaatgcctttctgttacccagatgcagtgctcttgtagtcccaagtctaagctctaggttgccttctttcctggcagaagttggtgtctatgccataaggaggtagttcctgttagaagggatttaattataccttatataaggaattagtgtttgcccttctaggtatagttggatgttagcttctgatgtaaactggatttctttttctttctctctctttttttttttttgttttggaggcagagttttgcccttgtaccccaggctggagtgcagtggtgtgatctcagctcacagcaacctccgcctcctgggttcaagcaattctgcctcggcctcccaagtagctgggattacaggcgactgccaccacacccggctaatttttgttttattagtagagatggggtttcaccatgttggccagactgatcttgaactcctgacctcaggtgatccacccgccttggcctcccaaagcgctgggattacaggcgtgagctgccgcacccagctgtaaactggatttctaatggtagatttttaggtattaacaatagataaaaagatactttttggcatactgtgtattgggatggggttagaacaggtgttctacccaagacatttacttaaaatcgccctcgaaatgctatgtgagctgtgtgtgtgtgtgtgtgtgtgtgtgtgtattaaggaaaagcatgaaagtatttatgcttgattttttttttttactcatagcttcatagtggaacagatacatagtctaaatcaaaatgtttaaactttttatgtcacttgctgtcttttcgtcctcgttaaatttaattttgttggtcttttgttgttattggttggttttctccaaatgctagctatgttaagaaatttaaggccaggtacagtggctcatgcctgtaatcccggcattttagaaggctgaggcaggaggatcacttgagctcaggagtttgagaccagtctgggcaacatagcaagacctcgtctttgtttaggggaaaaaaaagaaatttaagtaggagattatataagcaaaaatacaattaatttccagcattcactatataatataaatctccagactttacttttttgtttactggatataaacaatatctttttctgtctccagataattcccccaccacctcccatatgtccagattctcttgatgatgctgatgctttgggaagtatgttaatttcatggtacatgagtggctatcatactggctattatatggtaagtaatcactcagcatcttttcctgacaatttttttgtagttatgtgactttgttttgtaaatttataaaatactacttgcttctctctttatattactaaaaaataaaaataaaaaaatacaactgtctgaggcttaaattactcttgcattgtccctaagtataattttagttaattttaaaaagctttcatgctattgttagattattttgattatacacttttgaattgaaattatactttttctaaataatgttttaatctctgatttgaaattgattgtagggaatggaaaagatgggataatttttcataaatgaaaaatgaaattcttttttttttttttttttttttgagacggagtcttgctctgttgcccaggctggagtgcaatggcgtgatcttggctcacagcaagctctgccttctggattcacgccattctcctgcctcagcctcagaggtagctgggactacaggtgcctgccaccacgcctgtctaattttttgtatttttttgtaaagacagggtttcactgtgttagccaggatggtctcaatctcctgaccccgtgatccacccgcctcggccttccaagagaaatgaaatttttttaatgcacaaagatctggggtaatgtgtaccacattgaaccttggggagtatggcttcaaacttgtcactttatacgttagtctcctacggacatgttctattgtattttagtcagaacatttaaaattattttattttattttattttttttttttttttgagacggagtctcgctctgtcacccaggctggagtacagtggcgcagtctcggctcactgcaagctccgcctcccgggttcacgccattctcctgcctcagcctctccgagtagctgggactacaggcgcccgccaccacgcccggctaatttttttttatttttagtagagacggggtttcaccgtggtctcaatctcctgacctcgtgatccacccgcctcggcctcccaaagtgctgggattacaagcgtgagccaccgcgcccggcctaaaattatttttaaaagtaagctcttgtgccctgctaaaattatgatgtgatattgtaggcacttgtatttttagtaaattaatatagaagaaacaactgacttaaaggtgtatgtttttaaatgtatcatctgtgtgtgcccccattaatattcttatttaaaagttaaggccagacatggtggcttacaactgtaatcccaacagtttgtgaggccgaggcaggcagatcacttgaggtcaggagtttgagaccagcctggccaacatgatgaaaccttgtctctactaaaaataccaaaaaaaatttagccaggcatggtggcacatgcctgtaatccgagctacttgggaggctgtggcaggaaaattgctttaatctgggaggcagaggttgcagtgagttgagattgtgccactgcactccacccttggtgacagagtgagattccatctcaaaaaaagaaaaaggcctggcacggtggctcacacctataatcccagtactttgggaggtagaggcaggtggatcacttgaggttaggagttcaggaccagcctggccaacatggtgactactccatttctactaaatacacaaaacttagcccagtggcgggcagttgtaatcccagctacttgagaggttgaggcaggagaatcacttgaacctgggaggcagaggttgcagtgagccgagatcacaccgctgcactctagcctggccaacagagtgagaatttgcggagggaaaaaaaagtcacgcttcagttgttgtagtataaccttggtatattgtatgtatcatgaattcctcattttaatgaccaaaaagtaataaatcaacagcttgtaatttgttttgagatcagttatctgactgtaacactgtaggcttttgtgttttttaaattatgaaatatttgaaaaaaatacataatgtatatataaagtattggtataatttatgttctaaataactttcttgagaaataattcacatggtgtgcagtttacctttgaaagtatacaagttggctgggcacaatggctcacgcctgtaatcccagcactttgggaggccaaggcaggtggatcacgaggtcaggagatcgagaccatcctggctaacatggtgaaaccccgtctctactaaaagtacaaaaacaaattagccgggcatgttggcgggcaccttttgtcccagctgctcgggaggctgaggcaggagagtggcgtgaacccaggaggtggagcttgcagtgagccgagattgtgccagtgcactccagcctgggcgacagagcgagactctgtctcaaaaaataaaataaaaaagaaagtatacaagtcagtggttttggttttcagttatgcaaccatcactacaatttaagaacattttcatcaccccaaaaagaaaccctgttaccttcattttccccagccctaggcagtcagtacactttctgtctctatgaatttgtctattttagatattatatataaacggaattatacgatatgtggtcttttgtgtctggcttctttcacttagcatgctattttcaagattcatccatgctgtagaatgcaccagtactgcattccttcttattgctgaatattctgttgtttggttatatcacattttatccattcatcagttcatggacatttaggttgtttttatttttgggctataatgaataatgttgctatgaacattcgtttgtgttctttttgtttttttggttttttgggttttttttgttttgtttttgtttttgagacagtcttgctctgtctcctaagctggagtgcagtggcatgatcttggcttactgcaagctctgcctcccgggttcacaccattctcctgcctcagcccgacaagtagctgggactacaggcgtgtgccaccatgcacggctaattttttgtatttttagtagagatggggtttcaccgtgttagccaggatggtctcgatctcctgacctcgtgatctgcctgcctaggcctcccaaagtgctgggattacaggcgtgagccactgcacctggccttaagtgtttttaatacgtcattgccttaagctaacaattcttaacctttgttctactgaagccacgtggttgagataggctctgagtctagcttttaacctctatctttttgtcttagaaatctaagcagaatgcaaatgactaagaataatgttgttgaaataacataaaataggttataactttgatactcattagtaacaaatctttcaatacatcttacggtctgttaggtgtagattagtaatgaagtgggaagccactgcaagctagtatacatgtagggaaagatagaaagcattgaagccagaagagagacagaggacatttgggctagatctgacaagaaaaacaaatgttttagtattaatttttgactttaaattttttttttatttagtgaatactggtgtttaatggtctcattttaataagtatgacacaggtagtttaaggtcatatattttatttgatgaaaataaggtataggccgggcacggtggctcacacctgtaatcccagcactttgggaggccgaggcaggcggatcacctgaggtcgggagttagagactagcctcaacatggagaaaccccgtctctactaaaaaaaatacaaaattaggcgggcgtggtggtgcatgcctgtaatcccagctactcaggaggctgaggcaggagaattgcttgaacctgggaggtggaggttgcggtgagccgagatcacctcattgcactccagcctgggcaataagagcaaaactccatctcaaaaaaaaaaaaataaggtataagcgggctcaggaacatcattggacatactgaaagaagaaaaatcagctgggcgcagtggctcacgccggtaatcccaacactttgggaggccaaggcgggtgaatcacctgaagtcgggagttccagatcagcctgaccaacatggagaaaccctgtctctactaaaaatacaaaactagccgggcatggtggcgcatgcctgtaatcccagctacttgggaggctgaggcaggagagttgcttgaactgagaaggcggaggttgcggtgagccaagattgcaccattgcactccagcctgggcaacaagagcgaaactccgtctcaaaaaaaaaaggaagaaaaatatttttttaaattaattagtttatttattttttaagatggagttttgccctgtcgcccaggctggggtgcaatggtgcaatctcggctcactgcaacctccgcctcctgggttcaagtgattctcctgcctcagcttcccgagtagctgtgattacagccatatgccaccacgcccagccagttttgtgttttgttttgttttttgttttttttttttgagagggtgtcttgctctgtcccccaagctggagtgcagcggcgcgatcttggctcactgcaagctctgcctcccaggttcacaccattctcttgcctcagcctcccgagtagctgggactacaggtgcccgccaccacacccggctaatttttttgtgtttttagtagagatggggtttcactgtgttagccaggatggtctcgatctcctgaccttttgatccacccgcctcagcctccccaagtgctgggattataggcgtgagccactgtgcccggcctagtcttgtatttttagtagagtcggggtttctccatgttggtcaggctgttctccaaatccgacctcaggtgatccgcccgccttggcctccaaaagtgcaaggcattacaggcatgagccactgtgaccggcaatgtttttaaattttttaaatttaaattttattttttagagaccaggtctcactctattgctcaggctggagtgcaagggcacattcacagctcactgcagccttgacctccagggctcaagcagtcctctcacctcagtttcccgagtagctgggactacagtgataatgccactgcacctggctaatttttatttttatttatttatttttttttgagacagagtcttgctctgtcacccaggctggagtgcagtggtgtaaatctcagctcactgcagcctccgcctcctgggttcaagtgattctcctgcctcagcctcccaagtagctgggattagaggtccccaccaccatgcctggctaattttttgtactttcagtagaaatggggttttgccatgttggccaggctgttctcgaactcctgagctcaggtgatccaactgtctcggcctcccaaagtgctgggattacaggcgtgagccactgtgcctagcctgagccaccacgccggcctaatttttaaattttttgtagagacagggtctcattatgttgcccagggtggtgtcaagctccaggtctcaagtgatccccctacctccgcctcccaaagttgtgggattgtaggcatgagccactgcaagaaaaccttaactgcagcctaataattgttttctttgggataacttttaaagtacattaaaagactatcaacttaatttctgatcatattttgttgaataaaataagtaaaatgtcttgtgaaacaaaatgctttttaacatccatataaagctatctatatatagctatctatgtctatatagctattttttttaacttcctttattttccttacagggtttcagacaaaatcaaaaagaaggaaggtgctcacattccttaaattaaggagtaagtctgccagcattatgaaagtgaatcttacttttgtaaaactttatggtttgtggaaaacaaatgtttttgaacatttaaaaagttcagatgttaaaaagttgaaaggttaatgtaaaacaatcaatattaaagaattttgatgccaaaactattagataaaaggttaatctacatccctactagaattctcatacttaactggttggttatgtggaagaaacatactttcacaataaagagctttaggatatgatgccattttatatcactagtaggcagaccagcagacttttttttattgtgatatgggataacctaggcatactgcactgtacactctgacatatgaagtgctctagtcaagtttaactggtgtccacagaggacatggtttaactggaattcgtcaagcctctggttctaatttctcatttgcaggaaatgctggcatagagcagcactaaatgacaccactaaagaaacgatcagacagatctggaatgtgaagcgttatagaagataactggcctcatttcttcaaaatatcaagtgttgggaaagaaaaaaggaagtggaatgggtaactcttcttgattaaaagttatgtaataaccaaatgcaatgtgaaatattttactggactctattttgaaaaaccatctgtaaaagactggggtgggggtgggaggccagcacggtggtgaggcagttgagaaaatttgaatgtggattagattttgaatgatattggataattattggtaattttatgagctgtgagaagggtgttgtagtttataaaagactgtcttaatttgcatacttaagcatttaggaatgaagtgttagagtgtcttaaaatgtttcaaatggtttaacaaaatgtatgtgaggcgtatgtggcaaaatgttacagaatctaactggtggacatggctgttcattgtactgtttttttctatcttctatatgtttaaaagtatataataaaaatatttaatttttttttaaattagctgtatctgtgattgtatttcttttttgcatattattttgccctttggcccatattttgatatggatgccaccatagcattttgtgtatgtgcatgtgtattcccacttaatgtcacatttttcatgtctttacatattcttatttttgtttgtttttgagacagagtctcgctctgctgcccacgctggagtgcagtggtgcaatctcagctcactgcaacctgtgctatccgggttcaagcggttctcgtgcctcagccacgtgagtagttgggattacaggcatgtggcaccatgccccactaagttttgtatttttagtagagatggagtttcaccatgttggccaggctggtctcaaactcctgccctcaagtgattcgaccaccctggcctcccaaagtgctgggattacagccgtgagccaccgcacacggcctctctatttatttctatacatagcttttcacattatattatgtttatatattgtttatatctgtatttcctctttcattagagaaaaggtagtacatcttattcttcatggtgtctacaatatctggcagtttttggaagtcaagcgtgagcttagagcatagactggtgggattgtcaaagaagagggcaactggaagagaactgtcagttatttttggatcagtctttaattcatcatgacgggttaggcattagttgtatttcttgctaattttgaagaagacttattaacaaatcctacattaggtaaatggttttgaaagttgagttaatcataatggtgtttgacctaggactatttttaggccctatttatcttaatatcgaataatgaagcagcttcccccttagatatagacagaaaacatcaaagccaccacactacctggctggatttatcctagtaataaaatcaaaactgagc

SEQ ID NO: 428 - DNA, 18 bp, synthetic construct
  source 1..18: mol_type = other DNA
tcttaccctttccagagc

SEQ ID NO: 429 - DNA, 18 bp, synthetic construct
  source 1..18: mol_type = other DNA
ttcctattttcgtagcat

SEQ ID NO: 430 - DNA, 18 bp, synthetic construct
  source 1..18: mol_type = other DNA
tgatttcttttgtagtgg

SEQ ID NO: 431 - DNA, 18 bp, synthetic construct
  source 1..18: mol_type = other DNA
tttttctttttaaagaat

SEQ ID NO: 432 - DNA, 18 bp, synthetic construct
  source 1..18: mol_type = other DNA
aaatattccttatagcca

SEQ ID NO: 433 - DNA, 18 bp, synthetic construct
  source 1..18: mol_type = other DNA
tttttctgtctccagata

SEQ ID NO: 434 - DNA, 18 bp, synthetic construct
  source 1..18: mol_type = other DNA
ttattttccttacagggt

SEQ ID NO: 435 - DNA, 18 bp, synthetic construct
  source 1..18: mol_type = other DNA
atttctcatttgcaggaa

SEQ ID NO: 436 - DNA, 18 bp, synthetic construct
  source 1..18: mol_type = other DNA
caggtgaggtcgcagcca

SEQ ID NO: 437 - DNA, 18 bp, synthetic construct
  source 1..18: mol_type = other DNA
aaggtatgaaatgcttgn

SEQ ID NO: 438 - DNA, 18 bp, synthetic construct
  source 1..18: mol_type = other DNA
caggttattttaaaatgt

SEQ ID NO: 439 - DNA, 18 bp, synthetic construct
  source 1..18: mol_type = other DNA
gaggtaaggatacaaaaa

SEQ ID NO: 440 - DNA, 18 bp, synthetic construct
  source 1..18: mol_type = other DNA
aaggtaaaccttctatga

SEQ ID NO: 441 - DNA, 18 bp, synthetic construct
  source 1..18: mol_type = other DNA
ccagtaagtaaaaaagag

SEQ ID NO: 442 - DNA, 18 bp, synthetic construct
  source 1..18: mol_type = other DNA
atggtaagtaatcactca

SEQ ID NO: 443 - DNA, 18 bp, synthetic construct
  source 1..18: mol_type = other DNA
ggagtaagtctgccagca

SEQ ID NO: 444 - protein, 294 aa, Homo sapiens; identical to SEQ ID NO: 426

SEQ ID NO: 445 - DNA, 28885 bp, Homo sapiens
  source 1..28885: mol_type = genomic DNA
actcttaagaagggacggggccccacgctgcgcacccgcgggtttgctatggcgatgagcagcggcggcagtggtggcggcgtcccggagcaggaggattccgtgctgttccggcgcggcacaggccaggtgaggtcgcagccagtgcagtctccctattagcgctctcagcacccttcttccggcccaactctccttccgcagcctcgggacagcatcaagtcgatccgctcactggagttgtggtccgcgtttttctacgtcttttcccactccgttccctgcgaaccacatccgcaagctccttcctcgagcagtttgggctccttgatagcgttgagtggaggccctgccgcgacttggcagtagcttattttgttcactcctctctggctggtgtgggggaggtgggggcattaggccagggtgaagcaggggaaccacttaggagtctgttaagatgatctgaacttcagaacaagatgttattaacagagtgaaagtatttggattctgggtatattttgaaatcggaggcaacaggtttttcagatagattcgataacggaggttatcctgaatagttgaaaagataaagttgccttttgctgaggtgggaaagagaagattgccagtagagcaggtttctcaggagttcagtcttgggcatagcatggtaggggtgaatttggctggagtgagttggagagtaggagaagagaaatccaaggcaacatttgaccagcctgggcaacatagtgtgactccgagtctgcaaaaattagacgggtgttgtggtgcgcgtctgtggtctcagctacctggaaggttcaggccttggaaggctcagggaggtggaggctgcagtgatctgtgattgcgcctctgcactccagcctgggcgacagagccagaccctgtcttaaaacaaaataaacggccgggcgcggtggctcaagcctgtaatcccagcactttgggaggccgaggcggccggatcacaaggtcaggagatcgagaccatcctggctaacacggtgaaaccccgtctctactacaaatacaaaaaattagccgggcgtggtgacgggcgcctgtagtcccagctactcgggaggctgaggcaggagaatgtcatgaagccgggaggcggagcttgcagtgagccgagatcgcgccactgcactccagcctgggcgatagagcaagactccgtctcaaataaataaataaataaataaataaataataaaaacatcggtaggcatatttcaaggaattctatttaaaaaaaatttttttagagacaagttcgctctctgtggcccaggctggagtacagtggcatgatcctagcccatggcagcgttgatctcttggcctcaagcgaccctcctttggagtcgctgggcctaaaggagtgagccaccacgaaattttattataaatggagggtagagaaattgggcaataaatggagggggaagtgagttaagaggaattttaattatgtgtgtgtggttttaaaagaggggggtcttgctctgttgcccaggctgctggggtgccagtggcgcaatcatgaatcactacagccttggactcctggcctcaagctatcctcccacctctgcctcccaaagtactgggattactagtgtgagccactgcactaagataggagcaacatgtttcagcatgtttgtgggttgataggaaagatgagaatgggaaagttgatgtcggaaagaagacaatggctagagcaatgtcctagagtaggtaagaagggatggatttggcctttgttggaaacattagcggttcttttggtgacagctatatagttaacacatctatgatacgtgaatgggcagataggatggcaggagattttgaaagttctcttgattcttactgttctcttagtgaaagaagcaaggttatcagctagaagctgggatgggagaggaaagagaagatgggaagtagatagttctttagaagagtgggcaagggttggactagggaagtttagtggaaatattgctaggcaacataaagagcctacttgagattcgtggtcatgagttgaaggagaccagacagcaagattgtgtatgagggcacccacagagtaaatggagagttgaaattaatgcagttgtgattttaccacgtggatatgaagaagtgagggggagaagtacaaaggagttctcttaatgattgaccatggaatttaagctggctaagaaaggaagtgagaggccgggcgcggtggctcacgcctgtaatcccagcactttgggagactgaggtgggtggattacctgaggtcaggagtttgagaccaacctggccgatatggcgaaaccccatctctaataaaaatacagaaaaattagccgggaatggtggcaggtgcctgtaatcccagctactcaagaggctgtggcaggagtatcccttggacccaggaggtggaggttgcagtgagccgagatcacgccactgtactccagcctggacgatatagtgagacttcacctcaaaaaaaaaaaaaaagaaaggaagtgaggattttaagaccctgagagacagtttaaaaagtgggaggatcggccgggcgctgtggctgacacctgtaatcccagcactttgggaggccgagttgggcagatcacaaggtcaggagttcgagaccagcctggccaatatggtgaaaccttgtctctactaaaaatacaaaaattagccgggcatggtgtcacgtgtctataatcccagctactcgggaggctgaggcagaaaaattgcttgaacctgggaggcagaggttgcagacagctgagatcactccattgcactccagcctgggcaacaagagcaaaactttgtctttaaaaaaaaaaaaaaaaaaagaatacaaaaattagccgggcgtggtggcgcgtgcctataatcccagctacttgggaggctgaggcaggagaatcagttgaacacgggaggcgaggtttgcagtgagccgagattgcgccactgcactccagcctgggcgacagagcaggactcctcttggaaaaaaaaaattagctgggcatggtggcaggtgcctgtagtctcagctactagggaggctgaggcaggaaaatcacttgaacccgggatgtggagtttgcagtgacccgagatcgtgccactgtactccatcctgggcgacaaaatgagactctgcctcaaaaaaaaaaaaaaaaaaaagtgggaggatcaatgtactgccagtcctaatgaagtggaatgattgtccccatcaaatcactagtaggagtaagttgcagagcctagaaggtgatggttaagagagtgggattcttgaaactgcatttatggagaggttgtggttattggttataataaataaatacagttgaagtgagtgagtagctgagatttggggatgtatcagttcattcttacactgctacaaagacatacctgagaccaggtatttataaagataagaggtttaatcagctcacagttctgctgcctgtacaggcttctcttgtggaggcctaaggaaacttacagtcatggtggaaggtgaaggggaaacaagcacagtcttcacatggccagcaggagagagagagaagggggaagtgctacatactttaaaacaaccagatcttgtgagaacgcttatcaggaaacagcacttggggatggtgctaaatcattagaaatcacccccatgatccagtcgcctcctaccatgcccacctccaacactggggatcacaattcagcatgagatttgggtaggaacacagagctgcaccacatcagaggatgtacaagattgtggtggagaggagtttagagacctgcaaatatagggtaattgaagggatcatctacatggatatttaaatcaccaaaaattatgacaggagtagtgttggagagagaactgcgatgtaaacattaaggaatgaggaagagtgactcggtaggctgtaggtgactgcaataggaaacgataatagactgtgagtctggtgacaagattttccttctttctttttttccccccccccgagacagggcctctttttgttgcccaggtgggagtgcagtggcgcgatcacggctcactacaacctcctcccaagctcaagggattctcccacttcagcctctcaagtagctggaactacaggtgctgaccaccatgcctggctactttttgtcaggattttcaaggctgggaattttgagaggggaatggaggagaataatctgaaagtgcaagtaaggagcagggaagatttcttttttcttttttttttttttttttgagtcggagtctggctcagtcgcccaggctggagtgcagtggcgagatctccgctcactgcaagctccgcctcccgtgttcacgccattctcctccttcagcctcccgagtagctgggactacaggcgcccgccaccacgcccagctaattgtttttttgtatttttagtagagacggggtttcaccgtgttagccaggatggtctcaatctcctgactttgtgatccgcccaccccggcctcccaaagcgcttgggattacaggcgtgagccaccgcgccagccagagcagggaagatttcttccccacatctccagtaggtacagtgatatgaagtgtgtggaggagaaaagaggaaacatctatcatttgagatggctgcgaaaggaaaaggcatcctcagggagctagattttacttagagcaagaaatgaagggatgattcagaggttaaaagagtggattttatgaattactcaagggagcacagtggaagtttcaggaagtggtaggagaaggtagaagatggcagggtgttgggaataatttgagaaatctgagctactggaaatgactgagaatcagatataaaggcagtcctggtggtccgttctggctgccgttgctgtgtaacgaatctgccaaaacttagtggcttgaaacaacaaagaacattttattatctctcattgtttctgtgggttaggaatttgtgagagccgtgctgggcagttttcgtgcggctgtctcgtggttgcacctacatagttgctagagctacagtagctggggactgagcagctagggattggcaggctatctctttttttcatgtagtctcatgaagatttctttatgtggtttcaatgtgtgggctggtttggatttccttatagcatggtggcctcagttggattgctgttttgtgatccttttcatccctccttgtcctgtccccagacaaccactgatctactttctgtcaccatagattagcctgcatttttaagaatttttataaacgtggaatgatagagtaccttttttgtcacgtttcttttatttatcatagctattttgattttcatccattttattgctgagtagtatcccattgcatgtatatactatactgtattcattcgcttgcttgtgaacatttgggctttttccagtttgggactgttaacaagtagagccactatgaatattagtgtataagacttcatatagccaaggctggcagatcgcttgagcccaggagtttgagaccagcctgggaaacatggtgaaacctctatttttattttaaaatcaaaaattaaaaattttctataaaaaattttaaagaagactttgtatagacatacgctttcatttttcttgagtgaatacttaggtctcagggtagatgtattttaagtctttaaggagctgtcaaactcttcctcaaagtggtggttgtaccatgttactttttaatataacagagattaattgagcaaagaaaaattcaaaagttggacagcccccacaactaaataggttcagaacagctcccccattttgcattttgaccagcaatgtatgaaagttccatttgctcagtgtccctgcaaacacctggtatggtcagtctttttaattttaggcattataatagatatagtggcttcttgtgattttaattagcatttcctaatgaccagtgctgctgttgatcatttcatgagtgtatttgccatccgtatatcttttttggtgaagtgtctattcaaatcatttgggttttttttttttttgttttttttttttggagacagtgtctcactctgtcacccaggctgttgtgcagtggtgcaatcacacagcctactgcagcctccacctcctgcgctcagtcttcttgtctcagccttctgagtagctgaaattacgagcacacgccacaatgcctggctaattttttaaaattttgtagaaacaaggtctcattatgttgcctgggcttgtcgtgaactcctgggctcaagcaatcttcctgcctcagcctcccaaagattgggattgcaagtatgagccactgcacccggccaacttacccatcttttaattgaatttttttgttgttgaggtttgagagttcttcatgtttgctgggtacaatatctttatcagataggtaacttgcatgtattttctcccggtttacactttggtttttcattttgttaacaacgtctttttaagaacagaaaatcttaattttgctgaaatctaatttttcagttttttctttgatggttttgagagaggaggtaaaaaaagactaggtaagccgatagttagacagagtcctcggtagaacttcccttctaacaaaaagcagcccaagaaatcacttctcttctaacaaggagcagcctggaagatcgggctgtaaacatgtataaggaagcagctctggcacagagggggagcttcctgggtaatcagcaagcttcacatacgtaaggtgggtatgtgaagtaaacacagtatgtgaagtaaacacagtggaccttagtacatactcagataaggaagctggaagcttgcatgttgtgagttgttggggttgcctgcagctgcacggagagaaaggggtacctggggccaggcatgtccaccatggtggctccacctccccttatttagcacatgcacaataggaaagagataagcaatgtggagtagctcaggccaaggacctgcctgcataataaaaggttggggtgggggatgccagagattcacgctctgtgcagatggcaacacctggtcctaactggttttttgctccctatgtgtagataagctacccccttcccattagctcatttataaaaatgcttgcatttcactgtggaatgggaactcttttcaggacctctctctgcaggagagagctagtctctttcttttgcctattaaacttctgctctagcctcacacccttggtgtgtcagcgtccttgatttcctcagcgtgagaccaagaacctcgggtgccaccccaggcaacaaggccatttcagtttgttcttttgttataggcaatccatgatcacagatttttctctcttttttttttttacacagtttagagttttagttttacacttaggtctgtaatccattttgtattaattcttatatgtggctcagtgtaggtggaaatttggtttgtttttgcataaggatttccaatagttttaccaccatttcttgaaactactatgctttctctattaaaccacatttgtaactttagttaaaatcagtcacatatatcacagggctatttctgactctcaattctgttacattgtctattagtgtatattgatgtcagtactacacttttaattactattgcttcagggtatgtcttgtaaaccaaaaataaaattataggccccccccgcccctgcacaaccaactgaatggacccatcctctcagccaagggcattccaaaattaacctgaaaaactagttcaagccatgatgggaagggggagttggacatgtctcatcacaccctactaccttttggaattactgatagaacagactcttaaagtctgaaaagaaacatttacaacctaccctctctgaagcctgctacctgggagcttcatctgcatgataaaaccttggtctccacaaccccttatggtaacccaaacattcctttctgttgataataactctttcaactagttgccaattagaaaatctttaaatcttcctatgacctagaaacctccctacccccactttgagttgtcctgcctttcctgacagaactcatgtacatcttacatatattgattgatgcctcatgtctccctaaaatgtataaaacaaagctgtaccccaccaccttggggacatgtcatcaggacctcctgtggctgtgtcataggagcgtctttaactttggcaaaataaactttctaaattgattgaaacctgtcttagctacttctggtttacagtcttaaagttagataatgtaaattgtccagctttggtttatttttgtccttagtagttccatataaattttagaatcagcttttcaatttaatacactactttcctcttagatccacaattaaatatatttgatgctaacaattctgttttatgtttttcgttttttttttttgagacaagagtttcgctcttgttgcccaggctggagtgcagtggcgcgatcttggctcaccacaacctccacctcccaggttcaagcaattcttctgcctcagcctcccgagtagctgggattacaggcatgcgccaccacgcccggctaattttgtatttttagtagagacggggtttcaccatgttgatcaggctggtcttgaactcctgacctcaggtgatccacccacctcggcctcccaaagtgttgggattacaggcgtgaaccaccatgcctggccagttctgttatttttaaaacccaagtttccctggtcatatcttggttggatgaagcgtattttcaatagattaccctggaaaggctagtgagtacggtattcttctacattttagacttttcttagtcttgctacttcaaggacagctaggctgcatataaaattcttggctcatactttttccccataaatttctatgagaaagtctaatgataactgattttctttattttgtaacttagtctttttgcttagaggctctctgaggatgggagggggttcttcctcccatccctaggaatttttcttttttttaaattcctaatcactagaccaccaggaagattgtttgttttgttttgtttttattcttcagggaccccatttatacatacgttaaataaatactgtttgccaatgtatcaaccattttgcttcttatttatttttgttcctttggttctttttcatggctttgctttggtgctccttagattttcagtcagatgtatttgtccttgggtaccttgtaatcagtattaccttttcttctgtcgctttgttttctgttcgttttgaaattacttgtttcctggtctggcaataacagttgagatatgaggagtttgagctgccatctgtctatgtatcttgctttaagactgcactcttctattgatatcactggccttgattttgtgatttctttatttcttcaggaccacccttcattttctactgtttgcttcctttttttttgagatggagtctcactctgtcactcaggctggagtgcagtgatcttggctcattgcaacctctgcctcccgggttccagcaattctcctgcctcagcctcccaagtatctgggactacaggtgtgcaccaccatgcccggctaagttttgtatttttaatagagacggggttttgccacattggcaggctggtctcaaactcctgatgtcaagtgatccacccaccccacccacctctgcatcccaaagtgctgggattacaggaatgagctgccgtgcccagcctcccccctacccccctttttttctttcgagacagagattataggtgtgagccactggacccagcctgtttttattccttttaccaaatctccaaggaatatcttcccttccaagtgcgaatgtaaccttaagtcagttaacctctttgtgattacttttcttatctgcaaagtgacttaatgatcttaagtactttttttttttgagacagggtctcactgtcaccctggctggagtgcagtggcacgatctctgatctccactcactgcaatctcctcttccctggttcaagcggccctcccaccttagccttctgggtagctgggactacagatgtgaaccaccacgcccagctaatttttgtactttttgtagagatggggttttgccatgttgcccaggctgggattattaagtactttttatcatacagcaagattgacattttatattggaatacatttgtctctatataacggagattaacaggaaaatgacaagcctgggtgcggtggctcatgcctgtaatcccagcactttgggaggctgaggtgggaggatcacttgaggtcaggagttcgagaccagttttgccaagatgatgaaagcccatgtctactaaaaatacaaaaattagcccagcttgatggtgggcgcctataatcccagctatttgagagactgaggcaggagaatcacttgaacctgggcagcagaggttgcagtgagccgagatcatgccactgcactccagcctgggtggcatagcgagactcttgtctcaagagaaaacaaaacaaaacaaaaaaaaaacaggaaaatgacaaaaagtaatattacaactcagtgaattttataacaaacttttttggaattcattgactaatactataccaaatccaaaatactctctagtataccaaatccaactctaccctatagtataaattggattctatttggacttgtctcactaatccctcatacagtgtgttttattttttattgaagtaaaaaaatttgtcattttaaccatttttaagtatatagttcagtaatattaagtatgttcatgttgttgcgcaatagatcttcggaagtttttcgtcttgcaacctgaaactctacccattagcaaattcccatttctccttacacttagcccttggtaatcatcattcttttttttttttttttgagatggagttttactcttgttgcccaggctggagtgcaatggtgcaatctcgactcaccacaacctccgcctcccaggttcaagcaattctacctcagcctcccgagtagctgggattacagtcatgcaccaccacgcccggctaattttgtatttttagtagagaaggggtttctccatgttgaggctggtctcgaactcctgacctcaggtgatctgcccacctcggcctcccaaagtgctgggattacaggcgtgagccactgcgcctggcccattctttctaattctataaatttgactacttagttaccttacataaataaattcttatagttagtgttatttttgcttccatgccttttttgttgttgttcatgctcttacttggaatgcgttctattttgtctacctatgcacatcctgttgggttttttttttttttgggggttttttttgtttttttttgtttttttttcccagacaaggtctcaatttgttacccaggctggagtgcagcggcgccatctccactcactgcatcctcaacttcctgggcccaggtgatcctctcgcctcagcccctgcaggtagctgggactataggcatgtgccaccatgcccagctaaatttggtttttttgtttgtttgtttttgagacagagtctcactctgtcacccaggctggagtgcagtggcacaatctcagctcactgcaatctctgccgcccgggttcaagtgattctcctgcctcagcctcccaagcagctgggattacaggtgactgccaccacgccagctaagttttgtagttttagtagagatggggtttcaccttgttggccatgctggtctcgaactcctgacctcgtgatctgcctgcttctgcctcccaaagtgctggaattacaggcatgagccaccacgcccggccagaatttttgtatttttagtagacacaaggttcttaccctgttgcctaggctggtctggaagtcctggactcaagcaattcacctgccttggcctcccaaaatgctgggattacaagccaccatgcccggcctaaatcctgttgttttgttttgttttattttgttttgttttgttttgtttgttttttgagacagagtctcgctatgtctctcaggctgtagtgcagtggcgcgatcttggctcactgccacctctgcctcccaggttcaagtgattctcctgcctcagcctcccaagtagctgggattacaggcatgtgctactatgtccggctaatttttgtatttttagtagagacagggtttcaccatgttggccaggctggtctcgaactcctgacctcgtgatccacccacctcggccacccaaagtgctgggattacaggcgtgagtggtttttatttcttaggccggtttcctccatatgatcttgcagtagacattaatttctttcctttttaattaaaatactgtttgtatttcacattttgatgtttgttaagatttgttttatattgttttttgttttgtcttgtgtgatagtcttaaatccctagttagataataactggagagtaccatgtttctatatatctctcagtgacttgcacagtgctagcagatagtgctaaaaaattatttattattattattattttgttattgttgttgttgttgttagacagggtcttcctctgtcacccaggctagagggcaatgggatgatcatagcttactgcagcctccaacaactgggctcatgtaattctcctgcctcagcttcccaagtagctgggattacaggcatgagccaccatgtctggacaaaaatatttccaggtgcagtggctcatgcctgtaattcccacacttgggaggccgagcgaggctggaggatcacttgagcctaggagttcaagaccagcttggctaagatggcgagaccccgtccctacaaaaaattttaaaaactagccaggcatggtggcatgcacctatattcccaactactcagtgggctgaggtgggagggtcatttgaacacaggaatttgaggggagaaaaaaagaagagagaaagagaagtgaaggaaggaagaaaggaaggagggagggagagaagaaagaaacgaaagaaaggaaaagaaaaggaaggaaagaaaattggtaccaggaaagcaggaaagggaaatggaagtaaaaaaataataataataataaaatgaaaattggttagtcactattaacaatttgtatccttataatctggaaacattataatttcaaaagaaaaaatattctttggatcataggttctgaggtcagaacagcattcccgtagtctagatgaagtcaagttttatctgatcttaattgaaataaatatagctggccttgaacaaatctactcatggtatgtggataggaattaaattgtaggggcattcacttgatggcattcattcttagaacatttacctatgtctagcttttggagtaaagtcacataacctctaaccaggtaagtttcctgtggctttatttaggattttaaatactcattttcagtgtaattttgttatgtgtggattaagatgactcttggtactaacatacattttctgattaaacctatctgaacatgagttgtttttatttcttaccctttccagagcgatgattctgacatttgggatgatacagcactgataaaagcatatgataaagctgtggcttcatttaaggtatgaaatgcttgcttagtcgttttcttattttctcgttattcatttggaaaggaattgataacatacgataaagtgttaaagtacatgttattcagttttcattttgaagattagatggtagtatgagttagttaaatcaggtgatatcctcctttagaagttgatagcctatatatgtcatcctttgtggaggcaatttaaataaaatttaaaacatttattcctggctgggtatggtggctcactcctgtaatcccagcactttgagaggctgaggcgggtggatcacctgaggtcaggagtttgagaccagcctggccaacatggtgaaaccccgtctttactaaaaatacaaaaattagccaagcatggtggcacgtgcctgtaatcccagctgcttgggacactgaggcaggagaattgcttgaacctggggggcagaggttgcaatgattgcaccactgcactccagcctgggcgatagagtgagactccatctcagaaaacgaacaaacaatgtattccttttagtatttttacattgtatcaaactatggaagtcctctaattgagattaataagaaaaagacaatctgaattataattttaaacatttaacaagcatgtagtaaaataatgatgaagataaatagcattagtacagcaattaatatttgtagcatgctgacagtgctctgtgtgcgtttcatatattaaattactctaatcatcccaaatcctgtaagttgggtatcaattcaagtgttcctattgggtaggaatatacagttcttttaggaaatgtagtatggttctgtgtctcaaacaggacacttacacagttggccaacatcatcaccttctccattctctgagatgtttagtcttactgagcactaaatatgggtcatcaatagtccagactaccttgagcaaacaatagtccagactaccttgagcaaacagagcatatactcatacagtgtataaagagcaccaagcatacagatttcatgtctttctcatagttactcttgtaacatgagctaaagatcagacctctatgtcacctttgtaactgatttctagatttttttttttttttgagatggggtcttgccctgtcacccaggctggagtgtagtggcgtgatcatgcctcattggagccttcaactcatgagctcaaacaatcctcctacctcagcttcctgagtagttgggaccacaggtgtgtgccaccacacccagctcatttttgtattctttgtagagatgcagtctcaccctgttgcccacgctggcctggaactcctgagctcaaaagatccctccgccttgaccttccaaagtgctgggattacaagcatgaaccactgcacccggcctagatttttaaatgtgctttccagtatacactgaaactagaagtcgactaaagaattaccaagagaattctataaaatagagattgaaatggggctcgatgtgggatgggttggtgatattgcagggagaagtaatctgagtaaaggaggaaaagaactgatttgggaaaacgatagttttagtagtgagtttgagtatgaattaagttgagattgaatttgaattaagttgaggttgaatatgaattaagttgaggttgagtttgaggtatgaattaagatgtgaaattgatcattggaaatgttagattgagaaaagtcacagctggattaatagcttcagaagtgtgtttgcagacagttgcaactaaagtaataagaatagatggccttggccgggcgcggtggctcacgcctgtaatcccagtactttgggaggctgaggcgagcaaatcacgaggtcaggagttcaagaccagcctggcccacatggtgaaaccccgtctttattaaaaatacaaaaattagctgtgcacagtggtgcacgcctgtaatcccagctactcgggaggctgagacaggagaatcgcttgaacctgggaggtggaggttgcagtgagctgagatcagtgtgactgcactccagcccggtgacagagtgagactctgtgtaaaaaaataaaataaataaaataatggccgtaagcaagtaaagaaggatggccagctcttattgggaatgcctaaatctaaggcttgatcagaagtaatgaaaccgttggggccctacattgctatgacatccaaagggccatgaatatcaggaagaaagataattaacagggtctaatgttacagagaggttgagagcaaggagatttgattaaaagggtctttagagctgatgtcaggtgtatgatgcctttaagagcagtttttatagtgcagggggtggtcaaaagagaaaataggtgctttctgaggtgacggagccttgagactagcttatagtagtaactgggttatgtcgtgacttttattctgtgcaccaccctgtaacatgtacatttttattcctattttcgtagcatgctctaaagaatggtgacatttgtgaaacttcgggtaaaccaaaaaccacacctaaaagaaaacctgctaagaagaataaaagccaaaagaagaatactgcagcttccttacaacaggttattttaaaatgttgagatttaacttcaaaggatgtctcattagtccttatttaatagtgtaaaatgtctttaacttaagtgattagtacagtgtttctattgacatatacttatacaacttcaaaaacaactattaaattttctgttatttaggaacatgcatattagtcatgaaagtataaagaattagatgggaatgataaatgctaaaatcaggacatgtgttccatttgtgaatggaaggcagggagaaggtgccgtttggaaggagtacccaagagccgtaagctgaattggcagtgttttacatcttaagctgagagatagatttttttttcccctttttctttaaaaactctaaaactgttaattccaaggaacccagaagtctaggtagattatttctgctagttaaaagcagtagtcctgaaagctgaatattttggtgtcttttgagccaactttagtttcatcattaccaagggggaagagagctaacagttgatgagcacttgctctaggccagtccagagtgctgggcaccatacgcattttatctccctcccgctattcacaacaaatatgggaggtagtttatattatagccatctaataagatggggaaactaagactcaaagagattcagaaacttgtccatgattataaatgtaagagagttggaattcagatttatgtatttagaccccaagcctttctcattacatcattttgccttccaaatctctaccctctatccttcacctccccactgatcaaaacgagatgatagtttgccctcttcaaaagaaatgtgtgcatgtatatatctttgatttcttttgtagtggaaagttggggacaaatgttctgccatttggtcagaagacggttgcatttacccagctaccattgcttcaattgattttaagagagaaacctgtgttgtggtttacactggatatggaaatagagaggagcaaaatctgtccgatctactttccccaatctgtgaagtagctaataatatagaacaaaatgctcaagaggtaaggatacaaaaaaaaaaaaattcaatttctggaagcagagactagatgagaaactgttaaacagtatacacagttgtcagtttgatccaccgaggcattaattttttcttaatcacacccttataacaaaaacctgcatattttttctttttaaagaatgaaaatgaaagccaagtttcaacagatgaaagtgagaactccaggtctcctggaaataaatcagataacatcaagcccaaatctgctccatggaactcttttctccctccaccaccccccatgccagggccaagactgggaccaggaaaggtaaaccttctatgaaagttttccagaaaatagttaatgtcgggacatttaacctctctgttaactaatttgtagctctcccatgaaacttttgtagcttaaatacacaagaattttttgaaaaggaaataagataatgatgcaaaatagttaattttttaaaaaaatgttagacactgcagtggatgcaacaaaatactttatatgaaagatttatccagttaacttttgtggagtattaggtattagactaataattagcacacttacttaagttagaaagtataataatgcgccggacgcggtagctcacgcctgtaatcccagcactttgggaggccaaggtgggcggatcacaaggtcaggagatcgagaccatcctggctaacacggtgaaaccccatctctactgaaaatacaaaaaaatttgccgggcgtgatggcgggcacctgtagtcccagctactcgggaggctgaggcaggaggatggtgtgaaccccggaggcagagcttgcagtgagtcaagatcgtgccactgcactccaacctgggcgacagaatgagactccatctcaaacaaaaaaacaaaacaaaacaaaaaaaagtgtaataataatttatcattagctggatgatatgctgttgtttcccatgtcacctgtataagatatgtaaaataagaacacattatttacatctaatatagataaaatcctgaggcgctctcagattgttttgtagagttcaaatgtaaatattgttttcatttatggtccttttggttataagtaacagaaatcaactctaaaaagatttttattataggttagattatgtcatggaaccttaaggcttgtccctttctagttcttttgtgtaaagcggtgatttcttccatggagggaatggtatttaggcaatttttttttttttttcgagatggagtcttgctctgtcgctcaggctggagtgcagtggcaccatttcagctcactgcaacttccacctcctgggttcaagtgattctcctgcttcagcctcccaagtagctgagattacaggcacccgccaccacacccggcttattttgtatttttagtagagatggggtttcaccatgttggccaggctggtcttgaactcctgacctcaagtgatctccccaccttggccttccaaagtgctaggattacaggcgcctagcctaggcagtcattttcaaaaaacaagcatgactcaccaaaagttttaagattttctgtgataatgttcttattgaggcttacattatattacagtttcttgaatctaaaatgatgtaccctcttagaatatatacatcatgcttcattggtctcagggggctgatttttataaggagagatttgctagttttcacaatatgtcctctaagttggcatgtatagctaaacaggctttcataaaaatatacaatttagttaatgaaatttgggatatagtcttttatgattgaaataattttgctaaatagactgtctctgatttattaggtaatcaccactcttattttgttttacttccttaatgtctacatagaaaggaaatgagaaaaatccagaggttgtcatttgacttatgagtctgtttgacttcaggatttggtacatgaaatttcacttaatctttttgatatgtataaaacaaatattctgggtaattatttttatccttttggttttgagtcctttttattcctatcatattgaaattggtaagttaattttcctttgaaatattccttatagccaggtctaaaattcaatggcccaccaccgccaccgccaccaccaccaccccacttactatcatgctggctgcctccatttccttctggaccaccagtaagtaaaaaagagtataggttagattttgctttcacatacaatttgataattagcagaatagaggattgtaaaatgtcattgtagaacatcccttgggccagattctaatgggtagaaatttgaactaaacctctgggttttgtttgtttttaatgcctttctgttacccagatgcagtgctcttgtagtcccaagtctaagctctaggttgccttctttcctggcagaagttggtgtctatgccataaggaggtagttcctgttagaagggatttaattataccttatataaggaattagtgtttgcccttctaggtatagttggatgttagcttctgatgtaaactggatttctttttctttctctctctttttttttttttgttttggaggcagagttttgcccttgtaccccaggctggagtgcagtggtgtgatctcagctcacagcaacctccgcctcctgggttcaagcaattctgcctcggcctcccaagtagctgggattacaggcgactgccaccacacccggctaatttttgttttattagtagagatggggtttcaccatgttggccagactgatcttgaactcctgacctcaggtgatccacccgccttggcctcccaaagcgctgggattacaggcgtgagctgccgcacccagctgtaaactggatttctaatggtagatttttaggtattaacaatagataaaaagatactttttggcatactgtgtattgggatggggttagaacaggtgttctacccaagacatttacttaaaatcgccctcgaaatgctatgtgagctgtgtgtgtgtgtgtgtgtgtgtgtgtattaaggaaaagcatgaaagtatttatgcttgattttttttttttactcatagcttcatagtggaacagatacatagtctaaatcaaaatgtttaaactttttatgtcacttgctgtcttttcgtcctcgttaaatttaattttgttggtcttttgttgttattggttggttttctccaaatgctagctatgttaagaaatttaaggccaggtacagtggctcatgcctgtaatcccggcattttagaaggctgaggcaggaggatcacttgagctcaggagtttgagaccagtctgggcaacatagcaagacctcgtctttgtttaggggaaaaaaaagaaatttaagtaggagattatataagcaaaaatacaattaatttccagcattcactatataatataaatctccagactttacttttttgtttactggatataaacaatatctttttctgtctccagataattcccccaccacctcccatatgtccagattctcttgatgatgctgatgctttgggaagtatgttaatttcatggtacatgagtggctatcatactggctattatatggtaagtaatcactcagcatcttttcctgacaatttttttgtagttatgtgactttgttttgtaaatttataaaatactacttgcttctctctttatattactaaaaaataaaaataaaaaaatacaactgtctgaggcttaaattactcttgcattgtccctaagtataattttagttaattttaaaaagctttcatgctattgttagattattttgattatacacttttgaattgaaattatactttttctaaataatgttttaatctctgatttgaaattgattgtagggaatggaaaagatgggataatttttcataaatgaaaaatgaaattcttttttttttttttttttttttgagacggagtcttgctctgttgcccaggctggagtgcaatggcgtgatcttggctcacagcaagctctgcctcctggattcacgccattctcctgcctcagcctcagaggtagctgggactacaggtgcctgccaccacgcctgtctaattttttgtatttttttgtaaagacagggtttcactgtgttagccaggatggtctcaatctcctgaccccgtgatccacccgcctcggccttccaagagaaatgaaatttttttaatgcacaaagatctggggtaatgtgtaccacattgaaccttggggagtatggcttcaaacttgtcactttatacgttagtctcctacggacatgttctattgtattttagtcagaacatttaaaattattttattttattttattttttttttttttttgagacggagtctcgctctgtcacccaggctggagtacagtggcgcagtctcggctcactgcaagctccgcctcccgggttcacgccattctcctgcctcagcctctccgagtagctgggactacaggcgcccgccaccacgcccggctaatttttttttatttttagtagagacggggtttcaccgtggtctcgatctcctgacctcgtgatccacccgcctcggcctcccaaagtgctgggattacaagcgtgagccaccgcgcccggcctaaaattatttttaaaagtaagctcttgtgccctgctaaaattatgatgtgatattgtaggcacttgtatttttagtaaattaatatagaagaaacaactgacttaaaggtgtatgtttttaaatgtatcatctgtgtgtgcccccattaatattcttatttaaaagttaaggccagacatggtggcttacaactgtaatcccaacagtttgtgaggccgaggcaggcagatcacttgaggtcaggagtttgagaccagcctggccaacatgatgaaaccttgtctctactaaaaataccaaaaaaaatttagccaggcatggtggcacatgcctgtaatccgagctacttgggaggctgtggcaggaaaattgctttaatctgggaggcagaggttgcagtgagttgagattgtgccactgcactccacccttggtgacagagtgagattccatctcaaaaaaagaaaaaggcctggcacggtggctcacacctataatcccagtactttgggaggtagaggcaggtggatcacttgaggttaggagttcaggaccagcctggccaacatggtgactactccatttctactaaatacacaaaacttagcccagtggcgggcagttgtaatcccagctacttgagaggttgaggcaggagaatcacttgaacctgggaggcagaggttgcagtgagccgagatcacaccgctgcactctagcctggccaacagagtgagaatttgcggagggaaaaaaaagtcacgcttcagttgttgtagtataaccttggtatattgtatgtatcatgaattcctcattttaatgaccaaaaagtaataaatcaacagcttgtaatttgttttgagatcagttatctgactgtaacactgtaggcttttgtgttttttaaattatgaaatatttgaaaaaaatacataatgtatatataaagtattggtataatttatgttctaaataactttcttgagaaataattcacatggtgtgcagtttacctttgaaagtatacaagttggctgggcacaatggctcacgcctgtaatcccagcactttgggaggccagggcaggtggatcacgaggtcaggagatcgagaccatcctggctaacatggtgaaaccccgtctctactaaaagtacaaaaacaaattagccgggcatgttggcgggcaccttttgtcccagctgctcgggaggctgaggcaggagagtggcgtgaacccaggaggtggagcttgcagtgagccgagattgtgccagtgcactccagcctgggcgacagagcgagactctgtctcaaaaaataaaataaaaaagaaagtatacaagtcagtggttttggttttcagttatgcaaccatcactacaatttaagaacattttcatcaccccaaaaagaaaccctgttaccttcattttccccagccctaggcagtcagtacactttctgtctctatgaatttgtctattttagatattatatataaacggaattatacgatatgtggtcttttgtgtctggcttctttcacttagcatgctattttcaagattcatccatgctgtagaatgcaccagtactgcattccttcttattgctgaatattctgttgtttggttatatcacattttatccattcatcagttcatggacatttaggttgtttttatttttgggctataatgaataatgttgctatgaacattcgtttgtgttctttttgtttttttggttttttgggttttttttgttttgtttttgtttttgagacagtcttgctctgtctcctaagctggagtgcagtggcatgatcttggcttactgcaagctctgcctcccgggttcacaccattctcctgcctcagcccgacaagtagctgggactacaggcgtgtgccaccatgcacggctaattttttgtatttttagtagagatggggtttcaccgtgttagccaggatggtctcgatctcctgacctcgtgatctgcctgcctaggcctcccaaagtgctgggattacaggcgtgagccactgcacctggccttaagtgtttttaatacgtcattgccttaagctaacaattcttaacctttgttctactgaagccacgtggttgagataggctctgagtctagcttttaacctctatctttttgtcttagaaatctaagcagaatgcaaatgactaagaataatgttgttgaaataacataaaataggttataactttgatactcattagtaacaaatctttcaatacatcttacggtctgttaggtgtagattagtaatgaagtgggaagccactgcaagctagtatacatgtagggaaagatagaaagcattgaagccagaagagagacagaggacatttgggctagatctgacaagaaaaacaaatgttttagtattaatttttgactttaaattttttttttatttagtgaatactggtgtttaatggtctcattttaataagtatgacacaggtagtttaaggtcatatattttatttgatgaaaataaggtataggccgggcacggtggctcacacctgtaatcccagcactttgggaggccgaggcaggcggatcacctgaggtcgggagttagagactagcctcaacatggagaaaccccgtctctactaaaaaaaatacaaaattaggcgggcgtggtggtgcatgcctgtaatcccagctactcaggaggctgaggcaggagaattgcttgaacctgggaggtggaggttgcggtgagccgagatcacctcattgcactccagcctgggcaacaagagcaaaactccatctcaaaaaaaaaaaaataaggtataagcgggctcaggaacatcattggacatactgaaagaagaaaaatcagctgggcgcagtggctcacgccggtaatcccaacactttgggaggccaaggcaggcgaatcacctgaagtcgggagttccagatcagcctgaccaacatggagaaaccctgtctctactaaaaatacaaaactagccgggcatggtggcgcatgcctgtaatcccagctacttgggaggctgaggcaggagaattgcttgaaccgagaaggcggaggttgcggtgagccaagattgcaccattgcactccagcctgggcaacaagagcgaaactccgtctcaaaaaaaaaaggaagaaaaatatttttttaaattaattagtttatttattttttaagatggagttttgccctgtcacccaggctggggtgcaatggtgcaatctcggctcactgcaacctccgcctcctgggttcaagtgattctcctgcctcagcttcccgagtagctgtgattacagccatatgccaccacgcccagccagttttgtgttttgttttgttttttgttttttttttttgagagggtgtcttgctctgtcccccaagctggagtgcagcggcgcgatcttggctcactgcaagctctgcctcccaggttcacaccattctcttgcctcagcctcccgagtagctgggactacaggtgcccgccaccacacccggctaatttttttgtgtttttagtagagatggggtttcactgtgttagccaggatggtctcgatctcctgaccttttgatccacccgcctcagcctccccaagtgctgggattataggcgtgagccactgtgcccggcctagtcttgtatttttagtagagtcgggatttctccatgttggtcaggctgttctccaaatccgacctcaggtgatccgcccgccttggcctccaaaagtgcaaggcaaggcattacaggcatgagccactgtgaccggcaatgtttttaaattttttacatttaaattttattttttagagaccaggtctcactctattgctcaggctggagtgcaagggcacattcacagctcactgcagccttgacctccagggctcaagcagtcctctcacctcagtttcccgagtagctgggactacagtgataatgccactgcacctggctaatttttatttttatttatttatttttttttgagacagagtcttgctctgtcacccaggctggagtgcagtggtgtaaatctcagctcactgcagcctccgcctcctgggttcaagtgattctcctgcctcaacctcccaagtagctgggattagaggtccccaccaccatgcctggctaattttttgtactttcagtagaaacggggttttgccatgttggccaggctgttctcgaactcctgagctcaggtgatccaactgtctcggcctcccaaagtgctgggattacaggcgtgagccactgtgcctagcctgagccaccacgccggcctaatttttaaattttttgtagagacagggtctcattatgttgcccagggtggtgtcaagctccaggtctcaagtgatccccctacctccgcctcccaaagttgtgggattgtaggcatgagccactgcaagaaaaccttaactgcagcctaataattgttttctttgggataacttttaaagtacattaaaagactatcaacttaatttctgatcatattttgttgaataaaataagtaaaatgtcttgtgaaacaaaatgctttttaacatccatataaagctatctatatatagctatctatatctatatagctattttttttaacttcctttattttccttacagggttttagacaaaatcaaaaagaaggaaggtgctcacattccttaaattaaggagtaagtctgccagcattatgaaagtgaatcttacttttgtaaaactttatggtttgtggaaaacaaatgtttttgaacatttaaaaagttcagatgttagaaagttgaaaggttaatgtaaaacaatcaatattaaagaattttgatgccaaaactattagataaaaggttaatctacatccctactagaattctcatacttaactggttggttgtgtggaagaaacatactttcacaataaagagctttaggatatgatgccattttatatcactagtaggcagaccagcagacttttttttattgtgatatgggataacctaggcatactgcactgtacactctgacatatgaagtgctctagtcaagtttaactggtgtccacagaggacatggtttaactggaattcgtcaagcctctggttctaatttctcatttgcaggaaatgctggcatagagcagcactaaatgacaccactaaagaaacgatcagacagatctggaatgtgaagcgttatagaagataactggcctcatttcttcaaaatatcaagtgttgggaaagaaaaaaggaagtggaatgggtaactcttcttgattaaaagttatgtaataaccaaatgcaatgtgaaatattttactggactctattttgaaaaaccatctgtaaaagactgaggtgggggtgggaggccagcacggtggtgaggcagttgagaaaatttgaatgtggattagattttgaatgatattggataattattggtaattttatgagctgtgagaagggtgttgtagtttataaaagactgtcttaatttgcatacttaagcatttaggaatgaagtgttagagtgtcttaaaatgtttcaaatggtttaacaaaatgtatgtgaggcgtatgtggcaaaatgttacagaatctaactggtggacatggctgttcattgtactgtttttttctatcttctatatgtttaaaagtatataataaaaatatttaatttttttttaaattagctgtatctgtgattgtatttcttttttgcatattattttgccctttggcccatattttgatatggatgccaccatagcattttgtgtatgtgcatgtgtattcccacttaatgtcacatttttcatgtctttacatattcttatttttgtttgtttttgagacagagtctcgctctgctgcccacgctggagtgcagtggtgcaatctcagctcactgcaacctctgctatccgggttcaagcagttctcgtgcctcacccacgtgagtagttgggattacaggcatgtggcaccatgccccactaagttttgtatttttagtagagatggagtttcaccatgttggccaggctggtctcaaactcctgccctcaagtgattcgaccaccctggcctcccaaagtgctgggattacagccgtgagccaccgcacacggcctctctatttatttctatacatagcttttcacattatattatgtttatatattgtttatatctgtatttcctctttcattagagaaaaggtagtacatcttattcttcatggtgtctacaatatctggcagtttttggaagtcaagcgtgagcttagagcatagactggtgggattgtcaaagaagagggcaactggaagagaactgtcagttatttttggatcagtctttaattcatcatgacgggttaggcattagttgtatttcttgctaattttgaagaagacttattaacaaatcctacattaggtaaatggttttgaaagttgagttaatcataatggtgtttgacctaggactatttttaggccctatttatcttaatatcgaataatgaagcagcttcccccttagatatagacagaaaacatcaaagccaccacactacctggctggatttatcctagtaataaaatcaaaactgagc

SEQ ID NO: 446 - RNA, 20 nt, synthetic construct
  source 1..20: mol_type = other RNA
tatatatagatagctttata

SEQ ID NO: 447 - RNA, 20 nt, synthetic construct
  source 1..20: mol_type = other RNA
aaaccctgtaaggaaaataa

SEQ ID NO: 448 - RNA, 20 nt, synthetic construct
  source 1..20: mol_type = other RNA
acttcctttattttccttac

SEQ ID NO: 449 - RNA, 20 nt, synthetic construct
  source 1..20: mol_type = other RNA
cttcctttattttccttaca

SEQ ID NO: 450 - RNA, 20 nt, synthetic construct
  source 1..20: mol_type = other RNA
cagacttactccttaattta

SEQ ID NO: 451 - RNA, 20 nt, synthetic construct
  source 1..20: mol_type = other RNA
aagattcactttcataatgc

SEQ ID NO: 452 - RNA, 20 nt, synthetic construct
  source 1..20: mol_type = other RNA
cttacttttgtaaaacttta

SEQ ID NO: 453 - RNA, 20 nt, synthetic construct
  source 1..20: mol_type = other RNA
ttgtaaaactttatggtttg

SEQ ID NO: 454 - RNA, 20 nt, synthetic construct
  source 1..20: mol_type = other RNA
tcagatgttagaaagttgaa

SEQ ID NO: 455 - RNA, 20 nt, synthetic construct
  source 1..20: mol_type = other RNA
attttgtctaaaaccctgta

SEQ ID NO: 456 - RNA, 20 nt, synthetic construct
  source 1..20: mol_type = other RNA
aaaaagcattttgtttcaca

SEQ ID NO: 457 - RNA, 20 nt, synthetic construct
  source 1..20: mol_type = other RNA
aaaataagtaaaatgtcttg

SEQ ID NO: 458 - RNA, 20 nt, synthetic construct
  source 1..20: mol_type = other RNA
atatatagatagctttatat

SEQ ID NO: 459 - RNA, 20 nt, synthetic construct
  source 1..20: mol_type = other RNA
agatatagatagctatatat

SEQ ID NO: 460 - RNA, 20 nt, synthetic construct
  source 1..20: mol_type = other RNA
aaaaatagctatatagatat

SEQ ID NO: 461 - RNA, 20 nt, synthetic construct
  source 1..20: mol_type = other RNA
gttaaaaaaaatagctatat

SEQ ID NO: 462 - RNA, 20 nt, synthetic construct
  source 1..20: mol_type = other RNA
ttttgtctaaaaccctgtaa

SEQ ID NO: 463 - RNA, 20 nt, synthetic construct
  source 1..20: mol_type = other RNA
ttcactttcataatgctggc

SEQ ID NO: 464 - RNA, 20 nt, synthetic construct
  source 1..20: mol_type = other RNA
gagtaagtctgccagcatta

SEQ ID NO: 465 - RNA, 20 nt, synthetic construct
  source 1..20: mol_type = other RNA
cataaagttttacaaaagta

SEQ ID NO: 466 - RNA, 20 nt, synthetic construct
  source 1..20: mol_type = other RNA
tgtaaaactttatggtttgt

SEQ ID NO: 467 - RNA, 20 nt, synthetic construct
  source 1..20: mol_type = other RNA
ttgtggaaaacaaatgtttt

SEQ ID NO: 468 - RNA, 20 nt, synthetic construct
  source 1..20: mol_type = other RNA
cctttcaactttctaacatc

SEQ ID NO: 469 - RNA, 20 nt, synthetic construct
  source 1..20: mol_type = other RNA
atttaaaaagttcagatgtt

SEQ ID NO: 470 - RNA, 20 nt, synthetic construct
  source 1..20: mol_type = other RNA
tttgaacatttaaaaagttc

SEQ ID NO: 471 - RNA, 20 nt, synthetic construct
  source 1..20: mol_type = other RNA
aagttcagatgttagaaagt

SEQ ID NO: 472 - RNA, 20 nt, synthetic construct
  source 1..20: mol_type = other RNA
gtctgccagcattatgaaag

SEQ ID NO: 473 - RNA, 21 nt, synthetic construct
  source 1..21: mol_type = other RNA
gctatatatagatagctttat

SEQ ID NO: 474 - RNA, 21 nt, synthetic construct
  source 1..21: mol_type = other RNA
taacttcctttattttcctta

SEQ ID NO: 475 - RNA, 21 nt, synthetic construct
  source 1..21: mol_type = other RNA
gcagacttactccttaattta

SEQ ID NO: 476 - RNA, 21 nt, synthetic construct
  source 1..21: mol_type = other RNA
aagtctgccagcattatgaaa

SEQ ID NO: 477 - RNA, 21 nt, synthetic construct
  source 1..21: mol_type = other RNA
taagtaaaatgtcttgtgaaa

SEQ ID NO: 478 - RNA, 21 nt, synthetic construct
  source 1..21: mol_type = other RNA
tatagatatagatagctatat

SEQ ID NO: 479 - RNA, 21 nt, synthetic construct
  source 1..21: mol_type = other RNA
aaaaaaaatagctatatagat

SEQ ID NO: 480 - RNA, 21 nt, synthetic construct
  source 1..21: mol_type = other RNA
aaaccctgtaaggaaaataaa

SEQ ID NO: 481 - RNA, 21 nt, synthetic construct
  source 1..21: mol_type = other RNA
ttttgtctaaaaccctgtaag

SEQ ID NO: 482 - RNA, 21 nt, synthetic construct
  source 1..21: mol_type = other RNA
ataatgctggcagacttactc

SEQ ID NO: 483 - RNA, 21 nt, synthetic construct
  source 1..21: mol_type = other RNA
tacaaaagtaagattcacttt

SEQ ID NO: 484 - RNA, 21 nt, synthetic construct
  source 1..21: mol_type = other RNA
aaccataaagttttacaaaag

SEQ ID NO: 485 - RNA, 21 nt, synthetic construct
  source 1..21: mol_type = other RNA
aatcttacttttgtaaaactt

SEQ ID NO: 486 - RNA, 21 nt, synthetic construct
  source 1..21: mol_type = other RNA
ccacaaaccataaagttttac

SEQ ID NO: 487 - RNA, 21 nt, synthetic construct
  source 1..21: mol_type = other RNA
acatttgttttccacaaacca

SEQ ID NO: 488 - RNA, 21 nt, synthetic construct
  source 1..21: mol_type = other RNA
gtttttgaacatttaaaaagt

SEQ ID NO: 489 - RNA, 21 nt, synthetic construct
  source 1..21: mol_type = other RNA
atttaaaaagttcagatgtta

SEQ ID NO: 490 - RNA, 21 nt, synthetic construct
  source 1..21: mol_type = other RNA
agttcagatgttagaaagttg

SEQ ID NO: 491 - RNA, 21 nt, synthetic construct
  source 1..21: mol_type = other RNA
cagatgttagaaagttgaaag

SEQ ID NO: 492 - RNA, 21 nt, synthetic construct
  source 1..21: mol_type = other RNA
aaagttgaaaggttaatgtaa

SEQ ID NO: 493 - RNA, 21 nt, synthetic construct
  source 1..21: mol_type = other RNA
gagtaagtctgccagcattat

SEQ ID NO: 494 - RNA, 21 nt, synthetic construct
  source 1..21: mol_type = other RNA
gaagttaaaaaaaatagctat

SEQ ID NO: 495 - RNA, 21 nt, synthetic construct
  source 1..21: mol_type = other RNA
aggaaaataaaggaagttaaa

SEQ ID NO: 496 - RNA, 21 nt, synthetic construct
  source 1..21: mol_type = other RNA
aaactttatggtttgtggaaa

SEQ ID NO: 497 - RNA, 20 nt, synthetic construct
  source 1..20: mol_type = other RNA
attttgtctaaaaccctgta

SEQ ID NO: 498 - RNA, 20 nt, synthetic construct
  source 1..20: mol_type = other RNA
aattaaggagtaagtctgcc

SEQ ID NO: 499 - RNA, 100 nt, synthetic construct
  source 1..100: mol_type = other RNA
ttattcaacaaaatatgatcgttttagagctagaaatagcaagttaaaataaggctagtccgttatcaacttgaaaaagtggcaccgagtcggtgctttt

SEQ ID NO: 500 - RNA, 100 nt, synthetic construct
  source 1..100: mol_type = other RNA
aaccctgtaaggaaaataaagttttagagctagaaatagcaagttaaaataaggctagtccgttatcaacttgaaaaagtggcaccgagtcggtgctttt

SEQ ID NO: 501 - RNA, 100 nt, synthetic construct
  source 1..100: mol_type = other RNA
ttttgtctaaaaccctgtaagttttagagctagaaatagcaagttaaaataaggctagtccgttatcaacttgaaaaagtggcaccgagtcggtgctttt

SEQ ID NO: 502 - RNA, 100 nt, synthetic construct
  source 1..100: mol_type = other RNA
gtgagcaccttccttcttttgttttagagctagaaatagcaagttaaaataaggctagtccgttatcaacttgaaaaagtggcaccgagtcggtgctttt

SEQ ID NO: 503 - RNA, 100 nt, synthetic construct
  source 1..100: mol_type = other RNA
actccttaatttaaggaatggttttagagctagaaatagcaagttaaaataaggctagtccgttatcaacttgaaaaagtggcaccgagtcggtgctttt

SEQ ID NO: 504 - RNA, 100 nt, synthetic construct
  source 1..100: mol_type = other RNA
agacttactccttaatttaagttttagagctagaaatagcaagttaaaataaggctagtccgttatcaacttgaaaaagtggcaccgagtcggtgctttt

SEQ ID NO: 505 - RNA, 100 nt, synthetic construct
  source 1..100: mol_type = other RNA
tattttccttacagggttttgttttagagctagaaatagcaagttaaaataaggctagtccgttatcaacttgaaaaagtggcaccgagtcggtgctttt

SEQ ID NO: 506 - RNA, 100 nt, synthetic construct
  source 1..100: mol_type = other RNA
ttagacaaaatcaaaaagaagttttagagctagaaatagcaagttaaaataaggctagtccgttatcaacttgaaaaagtggcaccgagtcggtgctttt

SEQ ID NO: 507 - RNA, 100 nt, synthetic construct
  source 1..100: mol_type = other RNA
gctcacattccttaaattaagttttagagctagaaatagcaagttaaaataaggctagtccgttatcaacttgaaaaagtggcaccgagtcggtgctttt

SEQ ID NO: 508 - RNA, 100 nt, synthetic construct
  source 1..100: mol_type = other RNA
gagtaagtctgccagcattagttttagagctagaaatagcaagttaaaataaggctagtccgttatcaacttgaaaaagtggcaccgagtcggtgctttt

SEQ ID NO: 509 - RNA, 100 nt, synthetic construct
  source 1..100: mol_type = other RNA
tccttaatttaaggaatgtggttttagagctagaaatagcaagttaaaataaggctagtccgttatcaacttgaaaaagtggcaccgagtcggtgctttt

SEQ ID NO: 510 - RNA, 100 nt, synthetic construct
  source 1..100: mol_type = other RNA
cttaaattaaggagtaagtcgttttagagctagaaatagcaagttaaaataaggctagtccgttatcaacttgaaaaagtggcaccgagtcggtgctttt

SEQ ID NO: 511 - RNA, 100 nt, synthetic construct
  source 1..100: mol_type = other RNA
aaaccctgtaaggaaaataagttttagagctagaaatagcaagttaaaataaggctagtccgttatcaacttgaaaaagtggcaccgagtcggtgctttt

SEQ ID NO: 512 - RNA, 100 nt, synthetic construct
  source 1..100: mol_type = other RNA
cagacttactccttaatttagttttagagctagaaatagcaagttaaaataaggctagtccgttatcaacttgaaaaagtggcaccgagtcggtgctttt

SEQ ID NO: 513 - RNA, 100 nt, synthetic construct
  source 1..100: mol_type = other RNA
tttagacaaaatcaaaaagagttttagagctagaaatagcaagttaaaataaggctagtccgttatcaacttgaaaaagtggcaccgagtcggtgctttt

SEQ ID NO: 514 - RNA, 100 nt, synthetic construct
  source 1..100: mol_type = other RNA
gacaaaatcaaaaagaaggagttttagagctagaaatagcaagttaaaataaggctagtccgttatcaacttgaaaaagtggcaccgagtcggtgctttt

SEQ ID NO: 515 - RNA, 100 nt, synthetic construct
  source 1..100: mol_type = other RNA
tgctcacattccttaaattagttttagagctagaaatagcaagttaaaataaggctagtccgttatcaacttgaaaaagtggcaccgagtcggtgctttt

SEQ ID NO: 516 - RNA, 109 nt, synthetic construct
  source 1..109: mol_type = other RNA
gctatatatagatagctttatgttttagtactctgtaatgaaaattacagaatctactaaaacaaggcaaaatgccgtgtttatctcgtcaacttgttggcgagatttt

SEQ ID NO: 517 - RNA, 109 nt, synthetic construct
  source 1..109: mol_type = other RNA
gcagacttactccttaatttagttttagtactctgtaatgaaaattacagaatctactaaaacaaggcaaaatgccgtgtttatctcgtcaacttgttggcgagatttt

SEQ ID NO: 518 - RNA, 109 nt, synthetic construct
  source 1..109: mol_type = other RNA
gtgctcacattccttaaattagttttagtactctgtaatgaaaattacagaatctactaaaacaaggcaaaatgccgtgtttatctcgtcaacttgttggcgagatttt

SEQ ID NO: 519 - RNA, 109 nt, synthetic construct
  source 1..109: mol_type = other RNA
tacttattttattcaacaaaagttttagtactctgtaatgaaaattacagaatctactaaaacaaggcaaaatgccgtgtttatctcgtcaacttgttggcgagatttt

SEQ ID NO: 520 - RNA, 109 nt, synthetic construct
  source 1..109: mol_type = other RNA
cattttacttattttattcaagttttagtactctgtaatgaaaattacagaatctactaaaacaaggcaaaatgccgtgtttatctcgtcaacttgttggcgagatttt

SEQ ID NO: 521 - RNA, 109 nt, synthetic construct
  source 1..109: mol_type = other RNA
aaaaaaaatagctatatagatgttttagtactctgtaatgaaaattacagaatctactaaaacaaggcaaaatgccgtgtttatctcgtcaacttgttggcgagatttt

SEQ ID NO: 522 - RNA, 109 nt, synthetic construct
  source 1..109: mol_type = other RNA
aaaccctgtaaggaaaataaagttttagtactctgtaatgaaaattacagaatctactaaaacaaggcaaaatgccgtgtttatctcgtcaacttgttggcgagatttt

SEQ ID NO: 523 - RNA, 109 nt, synthetic construct
  source 1..109: mol_type = other RNA
ttttgtctaaaaccctgtaaggttttagtactctgtaatgaaaattacagaatctactaaaacaaggcaaaatgccgtgtttatctcgtcaacttgttggcgagatttt

SEQ ID NO: 524 - RNA, 109 nt, synthetic construct
  source 1..109: mol_type = other RNA
aatgtgagcaccttccttcttgttttagtactctgtaatgaaaattacagaatctactaaaacaaggcaaaatgccgtgtttatctcgtcaacttgttggcgagatttt

SEQ ID NO: 525 - RNA, 109 nt, synthetic construct
  source 1..109: mol_type = other RNA
ataatgctggcagacttactcgttttagtactctgtaatgaaaattacagaatctactaaaacaaggcaaaatgccgtgtttatctcgtcaacttgttggcgagatttt

SEQ ID NO: 526 - RNA, 109 nt, synthetic construct
  source 1..109: mol_type = other RNA
ttctgatcatattttgttgaagttttagtactctgtaatgaaaattacagaatctactaaaacaaggcaaaatgccgtgtttatctcgtcaacttgttggcgagatttt

SEQ ID NO: 527 - RNA, 109 nt, synthetic construct
  source 1..109: mol_type = other RNA
gatcatattttgttgaataaagttttagtactctgtaatgaaaattacagaatctactaaaacaaggcaaaatgccgtgtttatctcgtcaacttgttggcgagatttt

SEQ ID NO: 528 - RNA, 109 nt, synthetic construct
  source 1..109: mol_type = other RNA
tattttgttgaataaaataaggttttagtactctgtaatgaaaattacagaatctactaaaacaaggcaaaatgccgtgtttatctcgtcaacttgttggcgagatttt

SEQ ID NO: 529 - RNA, 109 nt, synthetic construct
  source 1..109: mol_type = other RNA
taagtaaaatgtcttgtgaaagttttagtactctgtaatgaaaattacagaatctactaaaacaaggcaaaatgccgtgtttatctcgtcaacttgttggcgagatttt

SEQ ID NO: 530 - RNA, 109 nt, synthetic construct
  source 1..109: mol_type = other RNA
ttttccttacagggttttagagttttagtactctgtaatgaaaattacagaatctactaaaacaaggcaaaatgccgtgtttatctcgtcaacttgttggcgagatttt

SEQ ID NO: 531 - RNA, 109 nt, synthetic construct
  source 1..109: mol_type = other RNA
ttagacaaaatcaaaaagaaggttttagtactctgtaatgaaaattacagaatctactaaaacaaggcaaaatgccgtgtttatctcgtcaacttgttggcgagatttt

SEQ ID NO: 532 - RNA, 109 nt, synthetic construct
  source 1..109: mol_type = other RNA
gaaggaaggtgctcacattccgttttagtactctgtaatgaaaattacagaatctactaaaacaaggcaaaatgccgtgtttatctcgtcaacttgttggcgagatttt

SEQ ID NO: 533 - RNA, 109 nt, synthetic construct
  source 1..109: mol_type = other RNA
tcacattccttaaattaaggagttttagtactctgtaatgaaaattacagaatctactaaaacaaggcaaaatgccgtgtttatctcgtcaacttgttggcgagatttt

SEQ ID NO: 534 - RNA, 100 nt, synthetic construct
  source 1..100: mol_type = other RNA
ttcactttcataatgctggcgttttagagctagaaatagcaagttaaaataaggctagtccgttatcaacttgaaaaagtggcaccgagtcggtgctttt

SEQ ID NO: 535 - RNA, 100 nt, synthetic construct
  source 1..100: mol_type = other RNA
cctttcaactttctaacatcgttttagagctagaaatagcaagttaaaataaggctagtccgttatcaacttgaaaaagtggcaccgagtcggtgctttt

SEQ ID NO: 536 - RNA, 100 nt, synthetic construct
  source 1..100: mol_type = other RNA
gtctgccagcattatgaaaggttttagagctagaaatagcaagttaaaataaggctagtccgttatcaacttgaaaaagtggcaccgagtcggtgctttt

SEQ ID NO: 537 - RNA, 100 nt, synthetic construct
  source 1..100: mol_type = other RNA
tgtaaaactttatggtttgtgttttagagctagaaatagcaagttaaaataaggctagtccgttatcaacttgaaaaagtggcaccgagtcggtgctttt

SEQ ID NO: 538 - RNA, 100 nt, synthetic construct
  source 1..100: mol_type = other RNA
agattcactttcataatgctgttttagagctagaaatagcaagttaaaataaggctagtccgttatcaacttgaaaaagtggcaccgagtcggtgctttt

SEQ ID NO: 539 - RNA, 100 nt, synthetic construct
  source 1..100: mol_type = other RNA
aattaaggagtaagtctgccgttttagagctagaaatagcaagttaaaataaggctagtccgttatcaacttgaaaaagtggcaccgagtcggtgctttt

SEQ ID NO: 540 - RNA, 100 nt, synthetic construct
  source 1..100: mol_type = other RNA
aagattcactttcataatgcgttttagagctagaaatagcaagttaaaataaggctagtccgttatcaacttgaaaaagtggcaccgagtcggtgctttt

SEQ ID NO: 541 - RNA, 100 nt, synthetic construct
  source 1..100: mol_type = other RNA
ttgtaaaactttatggtttggttttagagctagaaatagcaagttaaaataaggctagtccgttatcaacttgaaaaagtggcaccgagtcggtgctttt

SEQ ID NO: 542 - RNA, 100 nt, synthetic construct
  source 1..100: mol_type = other RNA
tcagatgttagaaagttgaagttttagagctagaaatagcaagttaaaataaggctagtccgttatcaacttgaaaaagtggcaccgagtcggtgctttt

SEQ ID NO: 543 - RNA, 109 nt, synthetic construct
  source 1..109: mol_type = other RNA
aagtctgccagcattatgaaagttttagtactctgtaatgaaaattacagaatctactaaaacaaggcaaaatgccgtgtttatctcgtcaacttgttggcgagatttt

SEQ ID NO: 544 - RNA, 109 nt, synthetic construct
  source 1..109: mol_type = other RNA
aatgtaaaacaatcaatattagttttagtactctgtaatgaaaattacagaatctactaaaacaaggcaaaatgccgtgtttatctcgtcaacttgttggcgagatttt

SEQ ID NO: 545 - RNA, 109 nt, synthetic construct
  source 1..109: mol_type = other RNA
tacaaaagtaagattcactttgttttagtactctgtaatgaaaattacagaatctactaaaacaaggcaaaatgccgtgtttatctcgtcaacttgttggcgagatttt

SEQ ID NO: 546 - RNA, 109 nt, synthetic construct
  source 1..109: mol_type = other RNA
ccacaaaccataaagttttacgttttagtactctgtaatgaaaattacagaatctactaaaacaaggcaaaatgccgtgtttatctcgtcaacttgttggcgagatttt

SEQ ID NO: 547 - RNA, 109 nt, synthetic construct
  source 1..109: mol_type = other RNA
acatttgttttccacaaaccagttttagtactctgtaatgaaaattacagaatctactaaaacaaggcaaaatgccgtgtttatctcgtcaacttgttggcgagatttt

SEQ ID NO: 548 - RNA, 109 nt, synthetic construct
  source 1..109: mol_type = other RNA
gagtaagtctgccagcattatgttttagtactctgtaatgaaaattacagaatctactaaaacaaggcaaaatgccgtgtttatctcgtcaacttgttggcgagatttt

SEQ ID NO: 549 - RNA, 109 nt, synthetic construct
  source 1..109: mol_type = other RNA
aatcttacttttgtaaaacttgttttagtactctgtaatgaaaattacagaatctactaaaacaaggcaaaatgccgtgtttatctcgtcaacttgttggcgagatttt

SEQ ID NO: 550 - RNA, 109 nt, synthetic construct
  source 1..109: mol_type = other RNA
aaactttatggtttgtggaaagttttagtactctgtaatgaaaattacagaatctactaaaacaaggcaaaatgccgtgtttatctcgtcaacttgttggcgagatttt

SEQ ID NO: 551 - RNA, 109 nt, synthetic construct
  source 1..109: mol_type = other RNA
acaaatgtttttgaacatttagttttagtactctgtaatgaaaattacagaatctactaaaacaaggcaaaatgccgtgtttatctcgtcaacttgttggcgagatttt

SEQ ID NO: 552 - RNA, 109 nt, synthetic construct
  source 1..109: mol_type = other RNA
gtttttgaacatttaaaaagtgttttagtactctgtaatgaaaattacagaatctactaaaacaaggcaaaatgccgtgtttatctcgtcaacttgttggcgagatttt

SEQ ID NO: 553 - RNA, 109 nt, synthetic construct
  source 1..109: mol_type = other RNA
atttaaaaagttcagatgttagttttagtactctgtaatgaaaattacagaatctactaaaacaaggcaaaatgccgtgtttatctcgtcaacttgttggcgagatttt

SEQ ID NO: 554 - RNA, 109 nt, synthetic construct
  source 1..109: mol_type = other RNA
agttcagatgttagaaagttggttttagtactctgtaatgaaaattacagaatctactaaaacaaggcaaaatgccgtgtttatctcgtcaacttgttggcgagatttt

SEQ ID NO: 555 - RNA, 109 nt, synthetic construct
  source 1..109: mol_type = other RNA
cagatgttagaaagttgaaaggttttagtactctgtaatgaaaattacagaatctactaaaacaaggcaaaatgccgtgtttatctcgtcaacttgttggcgagatttt

SEQ ID NO: 556 - RNA, 109 nt, synthetic construct
  source 1..109: mol_type = other RNA
aaagttgaaaggttaatgtaagttttagtactctgtaatgaaaattacagaatctactaaaacaaggcaaaatgccgtgtttatctcgtcaacttgttggcgagatttt

SEQ ID NO: 557 - RNA, 109 nt, synthetic construct
  source 1..109: mol_type = other RNA
ttgaaaggttaatgtaaaacagttttagtactctgtaatgaaaattacagaatctactaaaacaaggcaaaatgccgtgtttatctcgtcaacttgttggcgagatttt

SEQ ID NO: 558 - RNA, 20 nt, synthetic construct
  source 1..20: mol_type = other RNA
ttattcaacaaaatatgatc

SEQ ID NO: 559 - RNA, 20 nt, synthetic construct
  source 1..20: mol_type = other RNA
aaccctgtaaggaaaataaa

SEQ ID NO: 560 - RNA, 20 nt, synthetic construct
  source 1..20: mol_type = other RNA
ttttgtctaaaaccctgtaa

SEQ ID NO: 561 - RNA, 20 nt, synthetic construct
  source 1..20: mol_type = other RNA
gtgagcaccttccttctttt

SEQ ID NO: 562 - RNA, 20 nt, synthetic construct
  source 1..20: mol_type = other RNA
actccttaatttaaggaatg

SEQ ID NO: 563 - RNA, 20 nt, synthetic construct
  source 1..20: mol_type = other RNA
agacttactccttaatttaa

SEQ ID NO: 564 - RNA, 20 nt, synthetic construct
  source 1..20: mol_type = other RNA
tattttccttacagggtttt

SEQ ID NO: 565 - RNA, 20 nt, synthetic construct
  source 1..20: mol_type = other RNA
ttagacaaaatcaaaaagaa

SEQ ID NO: 566 - RNA, 20 nt, synthetic construct
  source 1..20: mol_type = other RNA
gctcacattccttaaattaa

SEQ ID NO: 567 - RNA, 20 nt, synthetic construct
  source 1..20: mol_type = other RNA
gagtaagtctgccagcatta

SEQ ID NO: 568 - RNA, 20 nt, synthetic construct
  source 1..20: mol_type = other RNA
tccttaatttaaggaatgtg

SEQ ID NO: 569 - RNA, 20 nt, synthetic construct
  source 1..20: mol_type = other RNA
cttaaattaaggagtaagtc

SEQ ID NO: 570 - RNA, 20 nt, synthetic construct
  source 1..20: mol_type = other RNA
aaaccctgtaaggaaaataa

SEQ ID NO: 571 - RNA, 20 nt, synthetic construct
  source 1..20: mol_type = other RNA
cagacttactccttaattta

SEQ ID NO: 572 - RNA, 20 nt, synthetic construct
  source 1..20: mol_type = other RNA
tttagacaaaatcaaaaaga

SEQ ID NO: 573 - RNA, 20 nt, synthetic construct
  source 1..20: mol_type = other RNA
gacaaaatcaaaaagaagga

SEQ ID NO: 574 - RNA, 20 nt, synthetic construct
  source 1..20: mol_type = other RNA
tgctcacattccttaaatta

SEQ ID NO: 575 - RNA, 21 nt, synthetic construct
  source 1..21: mol_type = other RNA
gctatatatagatagctttat

SEQ ID NO: 576 - RNA, 21 nt, synthetic construct
  source 1..21: mol_type = other RNA
gcagacttactccttaattta

SEQ ID NO: 577 - RNA, 21 nt, synthetic construct
  source 1..21: mol_type = other RNA
gtgctcacattccttaaatta

SEQ ID NO: 578 - RNA, 21 nt, synthetic construct
  source 1..21: mol_type = other RNA
tacttattttattcaacaaaa

SEQ ID NO: 579 - RNA, 21 nt, synthetic construct
  source 1..21: mol_type = other RNA
cattttacttattttattcaa

SEQ ID NO: 580 - RNA, 21 nt, synthetic construct
  source 1..21: mol_type = other RNA
aaaaaaaatagctatatagat

SEQ ID NO: 581 - RNA, 21 nt, synthetic construct
  source 1..21: mol_type = other RNA
aaaccctgtaaggaaaataaa

SEQ ID NO: 582 - RNA, 21 nt, synthetic construct
  source 1..21: mol_type = other RNA
ttttgtctaaaaccctgtaag

SEQ ID NO: 583 - RNA, 21 nt, synthetic construct
  source 1..21: mol_type = other RNA
aatgtgagcaccttccttctt

SEQ ID NO: 584 - RNA, 21 nt, synthetic construct
  source 1..21: mol_type = other RNA
ataatgctggcagacttactc

SEQ ID NO: 585 - RNA, 21 nt, synthetic construct
  source 1..21: mol_type = other RNA
ttctgatcatattttgttgaa

SEQ ID NO: 586 - RNA, 21 nt, synthetic construct
  source 1..21: mol_type = other RNA
gatcatattttgttgaataaa

SEQ ID NO: 587 - RNA, 21 nt, synthetic construct
  source 1..21: mol_type = other RNA
tattttgttgaataaaataag

SEQ ID NO: 588 - RNA, 21 nt, synthetic construct
  source 1..21: mol_type = other RNA
taagtaaaatgtcttgtgaaa

SEQ ID NO: 589 - RNA, 21 nt, synthetic construct
  source 1..21: mol_type = other RNA
ttttccttacagggttttaga

SEQ ID NO: 590 - RNA, 21 nt, synthetic construct
  source 1..21: mol_type = other RNA
ttagacaaaatcaaaaagaag

SEQ ID NO: 591 - RNA, 21 nt, synthetic construct
  source 1..21: mol_type = other RNA
gaaggaaggtgctcacattcc

SEQ ID NO: 592 - RNA, 21 nt, synthetic construct
  source 1..21: mol_type = other RNA
tcacattccttaaattaagga

SEQ ID NO: 593 - RNA, 20 nt, synthetic construct
  source 1..20: mol_type = other RNA
ttcactttcataatgctggc

SEQ ID NO: 594 - RNA, 20 nt, synthetic construct
  source 1..20: mol_type = other RNA
cctttcaactttctaacatc

SEQ ID NO: 595 - RNA, 20 nt, synthetic construct
  source 1..20: mol_type = other RNA
gtctgccagcattatgaaag

SEQ ID NO: 596 - RNA, 20 nt, synthetic construct
  source 1..20: mol_type = other RNA
tgtaaaactttatggtttgt

SEQ ID NO: 597 - RNA, 20 nt, synthetic construct
  source 1..20: mol_type = other RNA
agattcactttcataatgct

SEQ ID NO: 598 - RNA, 20 nt, synthetic construct
  source 1..20: mol_type = other RNA
aattaaggagtaagtctgcc

SEQ ID NO: 599 - RNA, 20 nt, synthetic construct
  source 1..20: mol_type = other RNA
aagattcactttcataatgc

SEQ ID NO: 600 - RNA, 20 nt, synthetic construct
  source 1..20: mol_type = other RNA
ttgtaaaactttatggtttg

SEQ ID NO: 601 - RNA, 20 nt, synthetic construct
  source 1..20: mol_type = other RNA
tcagatgttagaaagttgaa

SEQ ID NO: 602 - RNA, 21 nt, synthetic construct
  source 1..21: mol_type = other RNA
aagtctgccagcattatgaaa

SEQ ID NO: 603 - RNA, 21 nt, synthetic construct
  source 1..21: mol_type = other RNA
aatgtaaaacaatcaatatta

SEQ ID NO: 604 - RNA, 21 nt, synthetic construct
  source 1..21: mol_type = other RNA
tacaaaagtaagattcacttt

SEQ ID NO: 605 - RNA, 21 nt, synthetic construct
  source 1..21: mol_type = other RNA
ccacaaaccataaagttttac

SEQ ID NO: 606 - RNA, 21 nt, synthetic construct
  source 1..21: mol_type = other RNA
acatttgttttccacaaacca

SEQ ID NO: 607 - RNA, 21 nt, synthetic construct
  source 1..21: mol_type = other RNA
gagtaagtctgccagcattat

SEQ ID NO: 608 - RNA, 21 nt, synthetic construct
  source 1..21: mol_type = other RNA
aatcttacttttgtaaaactt

SEQ ID NO: 609 - RNA, 21 nt, synthetic construct
  source 1..21: mol_type = other RNA
aaactttatggtttgtggaaa

SEQ ID NO: 610 - RNA, 21 nt, synthetic construct
  source 1..21: mol_type = other RNA
acaaatgtttttgaacattta

SEQ ID NO: 611 - RNA, 21 nt, synthetic construct
  source 1..21: mol_type = other RNA
gtttttgaacatttaaaaagt

SEQ ID NO: 612 - RNA, 21 nt, synthetic construct
  source 1..21: mol_type = other RNA
atttaaaaagttcagatgtta

SEQ ID NO: 613 - RNA, 21 nt, synthetic construct
  source 1..21: mol_type = other RNA
agttcagatgttagaaagttg

SEQ ID NO: 614 - RNA, 21 nt, synthetic construct
  source 1..21: mol_type = other RNA
cagatgttagaaagttgaaag

SEQ ID NO: 615 - RNA, 21 nt, synthetic construct
  source 1..21: mol_type = other RNA
aaagttgaaaggttaatgtaa

SEQ ID NO: 616 - RNA, 21 nt, synthetic construct
  source 1..21: mol_type = other RNA
ttgaaaggttaatgtaaaaca

SEQ ID NO: 617 - DNA, 63 bp, synthetic construct
  source 1..63: mol_type = other DNA
agggttttagacaaaatcaaaaagaaggaaggtgctcacattccttaaattaaggagtaagtc

SEQ ID NO: 618 - protein, 16 aa, synthetic construct
GFRQNQKEGRCSHSLN

SEQ ID NO: 619 - protein, 297 aa, synthetic construct
AATAAAATAAGTAAAATGTCTTGTGAAACAAAATGCTTTTTAACATCCATATAAAGCTATCTATATATAGCTATCTATATCTATATAGCTATTTTTTTTAACTTCCTTTATTTTCCTTACAGGGTTTTAGACAAAATCAAAAAGAAGGAAGGTGCTCACATTCCTTAAATTAAGGAGTAAGTCTGCCAGCATTATGAAAGTGAATCTTACTTTTGTAAAACTTTATGGTTTGTGGAAAACAAATGTTTTTGAACATTTAAAAAGTTCAGATGTTAGAAAGTTGAAAGGTTAATGTAA

SEQ ID NO: 620 - DNA, 23 bp, synthetic construct
  source 1..23: mol_type = other DNA
cacattccagatctgtctgatcg

SEQ ID NO: 621 - DNA, 21 bp, synthetic construct
  source 1..21: mol_type = other DNA
caccacctcccatatgtccag

SEQ ID NO: 622 - DNA, 24 bp, synthetic construct
  source 1..24: mol_type = other DNA
tactggctattatatgggttttag

SEQ ID NO: 623 - DNA, 27 bp, synthetic construct
  source 1..27: mol_type = other DNA
actggctattatatggaaatgctggca

SEQ ID NO: 624 - DNA, 24 bp, synthetic construct
  source 1..24: mol_type = other DNA
aagaaggaaggtgctcacattcct

SEQ ID NO: 625 - RNA, 20 nt, synthetic construct
  source 1..20: mol_type = other RNA
gtctaaaaccctgtaaggaa

SEQ ID NO: 626 - RNA, 20 nt, synthetic construct
  source 1..20: mol_type = other RNA
ttaaggagtaagtctgccag

SEQ ID NO: 627 - RNA, 20 nt, synthetic construct
  source 1..20: mol_type = other RNA
aagtctgccagcattatgaa

SEQ ID NO: 628 - RNA, 20 nt, synthetic construct
  source 1..20: mol_type = other RNA
ctgccagcattatgaaagtg

SEQ ID NO: 629 - RNA, 100 nt, synthetic construct
  source 1..100: mol_type = other RNA
gtctaaaaccctgtaaggaagttttagagctagaaatagcaagttaaaataaggctagtccgttatcaacttgaaaaagtggcaccgagtcggtgctttt

SEQ ID NO: 630 - RNA, 100 nt, synthetic construct
  source 1..100: mol_type = other RNA
ttaaggagtaagtctgccaggttttagagctagaaatagcaagttaaaataaggctagtccgttatcaacttgaaaaagtggcaccgagtcggtgctttt

SEQ ID NO: 631 - RNA, 100 nt, synthetic construct
  source 1..100: mol_type = other RNA
aagtctgccagcattatgaagttttagagctagaaatagcaagttaaaataaggctagtccgttatcaacttgaaaaagtggcaccgagtcggtgctttt

SEQ ID NO: 632 - RNA, 100 nt, synthetic construct
  source 1..100: mol_type = other RNA
ctgccagcattatgaaagtggttttagagctagaaatagcaagttaaaataaggctagtccgttatcaacttgaaaaagtggcaccgagtcggtgctttt

SEQ ID NO: 633 - protein, 1576 aa, synthetic construct
MDKKYSIGLAIGTNSVGWAVITDEYKVPSKKFKVLGNTDRHSIKKNLIGALLFDSGETAEATRLKRTARRRYTRRKNRICYLQEIFSNEMAKVDDSFFHRLEESFLVEEDKKHERHPIFGNIVDEVAYHEKYPTIYHLRKKLVDSTDKADLRLIYLALAHMIKFRGHFLIEGDLNPDNSDVDKLFIQLVQTYNQLFEENPINASGVDAKAILSARLSKSRRLENLIAQLPGEKKNGLFGNLIALSLGLTPNFKSNFDLAEDAKLQLSKDTYDDDLDNLLAQIGDQYADLFLAAKNLSDAILLSDILRVNTEITKAPLSASMIKRYDEHHQDLTLLKALVRQQLPEKYKEIFFDQSKNGYAGYIDGGASQEEFYKFIKPILEKMDGTEELLVKLNREDLLRKQRTFDNGSIPHQIHLGELHAILRRQEDFYPFLKDNREKIEKILTFRIPYYVGPLARGNSRFAWMTRKSEETITPWNFEEVVDKGASAQSFIERMTNFDKNLPNEKVLPKHSLLYEYFTVYNELTKVKYVTEGMRKPAFLSGEQKKAIVDLLFKTNRKVTVKQLKEDYFKKIECFDSVEISGVEDRFNASLGTYHDLLKIIKDKDFLDNEENEDILEDIVLTLTLFEDREMIEERLKTYAHLFDDKVMKQLKRRRYTGWGRLSRKLINGIRDKQSGKTILDFLKSDGFANRNFMQLIHDDSLTFKEDIQKAQVSGQGDSLHEHIANLAGSPAIKKGILQTVKVVDELVKVMGRHKPENIVIEMARENQTTQKGQKNSRERMKRIEEGIKELGSQILKEHPVENTQLQNEKLYLYYLQNGRDMYVDQELDINRLSDYDVDHIVPQSFLKDDSIDNKVLTRSDKNRGKSDNVPSEEVVKKMKNYWRQLLNAKLITQRKFDNLTKAERGGLSELDKAGFIKRQLVETRQITKHVAQILDSRMNTKYDENDKLIREVKVITLKSKLVSDFRKDFQFYKVREINNYHHAHDAYLNAVVGTALIKKYPKLESEFVYGDYKVYDVRKMIAKSEGSSGSETPGTSESATPESSGSEVEFSHEYWMRHALTLAKRARDEREVPVGAVLVLNNRVIGEGWNRAIGLHDPTAHAEIMALRQGGLVMQNYRLYDATLYSTFEPCVMCAGAMIHSRIGRVVFGVRNAKTGAAGSLMDVLHHPGMNHRVEITEGILADECAALLCRFFRMPRRVFNAQKKAQSSTDQEIGKATAKYFFYSNIMNFFKTEITLANGEIRKRPLIETNGETGEIVWDKGRDFATVRKVLSMPQVNIVKKTEVQTGGFSKESILPKRNSDKLIARKKDWDPKKYGGFVSPTVAYSVLVVAKVEKGKSKKLKSVKELLGITIMERSSFEKNPIDFLEAKGYKEVKKDLIIKLPKYSLFELENGRKRMLASARELQKGNELALPSKYVNFLYLASHYEKLKGSPEDNEQKQLFVEQHKHYLDEIIEQISEFSKRVILADANLDKVLSAYNKHRDKPIREQAENIIHLFTLTNLGAPAAFKYFDTTIDRKQYRSTKEVLDATLIHQSITGLYETRIDLSQLGGDEGADKRTADGSEFESPKKKRKV

SEQ ID NO: 634 - DNA, 4731 bp, synthetic construct
  source 1..4731: mol_type = other DNA
atggacaagaagtactctatcggactggccatcggcaccaactctgttggatgggccgtgatcaccgacgagtacaaggtgcccagcaagaaattcaaggtgctgggcaacaccgaccggcacagcatcaagaagaatctgatcggcgccctgctgttcgactctggcgaaacagccgaagccaccagactgaagagaaccgccaggcggagatacacccggcggaagaaccggatctgctacctgcaagagatcttcagcaacgagatggccaaggtggacgacagcttcttccacagactggaagagtccttcctggtggaagaggacaagaagcacgagcggcaccccatcttcggcaacatcgtggatgaggtggcctaccacgagaagtaccccaccatctaccacctgagaaagaaactggtggacagcaccgacaaggccgacctgagactgatctacctggctctggcccacatgatcaagttccggggccactttctgatcgagggcgatctgaaccccgacaacagcgacgtggacaagctgttcatccagctggtgcagacctacaaccagctgttcgaggaaaaccccatcaacgcctctggcgtggacgccaaggctatcctgtctgccagactgagcaagagcagaaggctggaaaacctgatcgcccagctgcctggcgagaagaagaatggcctgttcggcaacctgattgccctgagcctgggactgacccctaacttcaagagcaacttcgacctggccgaggatgccaaactgcagctgagcaaggacacctacgacgacgacctggacaatctgctggcccagatcggcgatcagtacgccgacttgtttctggccgccaagaacctgtccgacgccatcctgctgagcgatatcctgagagtgaacaccgagatcacaaaggcccctctgagcgcctctatgatcaagagatacgacgagcaccaccaggatctgaccctgctgaaggccctcgttagacagcagctgccagagaagtacaaagagattttcttcgatcagtccaagaacggctacgccggctacattgatggcggagccagccaagaggaattctacaagttcatcaagcccatcctggaaaagatggacggcaccgaggaactgctggtcaagctgaacagagaggacctgctgcggaagcagcggaccttcgacaatggctctatccctcaccagatccacctgggagagctgcacgccattctgcggagacaagaggacttttacccattcctgaaggacaaccgggaaaagatcgagaagatcctgaccttcaggatcccctactacgtgggaccactggccagaggcaatagcagattcgcctggatgaccagaaagagcgaggaaaccatcacaccctggaacttcgaggaagtggtggacaagggcgccagcgctcagtccttcatcgagcggatgaccaacttcgataagaacctgcctaacgagaaggtgctgcccaagcactccctgctgtatgagtacttcaccgtgtacaacgagctgaccaaagtgaaatacgtgaccgagggaatgagaaagcccgcctttctgagcggcgagcagaaaaaggccattgtggatctgctgttcaagaccaaccggaaagtgaccgtgaagcagctgaaagaggactacttcaagaaaatcgagtgcttcgacagcgtggaaatcagcggcgtggaagatcggttcaatgccagcctgggcacataccacgacctgctgaaaattatcaaggacaaggacttcctggacaacgaagagaacgaggacattctcgaggacatcgtgctgaccctgacactgtttgaggacagagagatgatcgaggaacggctgaaaacatacgcccacctgttcgacgacaaagtgatgaagcaactgaagcggaggcggtacacaggctggggcagactgtctcggaagctgatcaacggcatccgggataagcagtccggcaagacaatcctggatttcctgaagtccgacggcttcgccaacagaaacttcatgcagctgatccacgacgacagcctgacctttaaagaggacatccagaaagcccaggtgtccggccaaggcgattctctgcacgagcacattgccaacctggccggatctcccgccattaagaagggcatcctgcagacagtgaaggtggtggacgagcttgtgaaagtgatgggcagacacaagcccgagaacatcgtgatcgaaatggccagagagaaccagaccacacagaagggccagaagaacagccgcgagagaatgaagcggatcgaagagggcatcaaagagctgggcagccagatcctgaaagaacaccccgtggaaaacacccagctgcagaacgagaagctgtacctgtactacctgcagaatggacgggatatgtacgtggaccaagagctggacatcaaccggctgagcgactacgatgtggaccatatcgtgccccagagctttctgaaggacgactccatcgataacaaggtcctgaccagaagcgacaagaaccggggcaagagcgataacgtgccctccgaagaggtggtcaagaagatgaagaactactggcgacagctgctgaacgccaagctgattacccagcggaagttcgataacctgaccaaggccgagagaggcggcctgagcgaacttgataaggccggcttcattaagcggcagctggtggaaacccggcagatcaccaaacacgtggcacagattctggactcccggatgaacactaagtacgacgagaatgacaagctgatccgggaagtgaaagtcatcaccctgaagtctaagctggtgtccgatttccggaaggatttccagttctacaaagtgcgggaaatcaacaactaccatcacgcccacgacgcctacctgaatgccgttgttggaacagccctgatcaagaagtatcccaagctggaaagcgagttcgtgtacggcgactacaaggtgtacgacgtgcggaagatgatcgccaagagcgaaggatcttctggaagcgaaaccccaggcaccagcgagtctgccacaccagaatcatctggcagcgaggtcgagttctctcacgaatattggatgagacacgctctcaccctggctaagagagccagggacgaaagagaggtgccagttggcgctgtcctggtgttgaacaatcgcgtcatcggagaaggatggaatcgcgccattggcctgcacgatccaaccgcacatgccgaaattatggctctgcggcaaggcggcctcgtgatgcaaaattacagactgtacgatgctaccctctactccaccttcgagccctgtgtcatgtgtgctggggcaatgattcactcccggattggccgcgtggtgtttggagtgcggaatgccaagactggcgccgctggatctctgatggacgtcctgcaccatcctgggatgaaccaccgggtcgagatcacagagggaattctggctgacgagtgcgctgccctgctgtgcaggttctttagaatgcctagaagggtgttcaacgcccagaaaaaagctcagagcagcaccgatcaagagatcggcaaggctaccgccaagtactttttctacagcaacatcatgaactttttcaagacagagatcaccctggccaacggcgagatccggaaaagacccctgatcgagacaaacggcgaaaccggggagatcgtgtgggataagggcagagattttgccacagtgcggaaagtgctgagcatgccccaagtgaatatcgtgaagaaaaccgaggtgcagacaggcggcttcagcaaagagtctatcctgcctaagcggaacagcgataagctgatcgccagaaagaaggactgggaccccaagaaatacggcggcttcgtgtctcctaccgtggcctattctgtgctggtggtggccaaagtggaaaagggcaagtccaaaaagctcaagagcgtgaaagagctgctggggatcaccatcatggaaagaagcagctttgagaagaacccgatcgactttctggaagccaagggctacaaagaagtcaagaaggacctcatcatcaagctccccaagtacagcctgttcgagctggaaaatggccggaagcggatgctggcctctgctagagaactgcagaagggaaacgagctggccctgcctagcaaatatgtgaacttcctgtacctggccagccactatgagaagctgaagggcagccccgaggacaatgagcaaaagcagctgtttgtggaacagcacaagcactacctggacgagatcatcgagcagatcagcgagttctccaagagagtgatcctggccgacgctaacctggataaggtgctgtctgcctataacaagcaccgggacaagcctatcagagagcaggccgagaatatcatccacctgtttaccctgaccaacctgggagcccctgccgccttcaagtacttcgacaccaccatcgaccggaagcagtaccggtccaccaaagaggtgctggacgccacactgatccaccagtctatcaccggcctgtacgaaacccggatcgacctgtctcagctcggaggcgacgaaggcgccgataagagaaccgccgatggctctgagttcgagagccccaagaaaaagcgcaaagtgtaa

SEQ ID NO: 635 - protein, 1576 aa, synthetic construct
MDKKYSIGLAIGTNSVGWAVITDEYKVPSKKFKVLGNTDRHSIKKNLIGALLFDSGETAEATRLKRTARRRYTRRKNRICYLQEIFSNEMAKVDDSFFHRLEESFLVEEDKKHERHPIFGNIVDEVAYHEKYPTIYHLRKKLVDSTDKADLRLIYLALAHMIKFRGHFLIEGDLNPDNSDVDKLFIQLVQTYNQLFEENPINASGVDAKAILSARLSKSRRLENLIAQLPGEKKNGLFGNLIALSLGLTPNFKSNFDLAEDAKLQLSKDTYDDDLDNLLAQIGDQYADLFLAAKNLSDAILLSDILRVNTEITKAPLSASMIKRYDEHHQDLTLLKALVRQQLPEKYKEIFFDQSKNGYAGYIDGGASQEEFYKFIKPILEKMDGTEELLVKLNREDLLRKQRTFDNGSIPHQIHLGELHAILRRQEDFYPFLKDNREKIEKILTFRIPYYVGPLARGNSRFAWMTRKSEETITPWNFEEVVDKGASAQSFIERMTNFDKNLPNEKVLPKHSLLYEYFTVYNELTKVKYVTEGMRKPAFLSGEQKKAIVDLLFKTNRKVTVKQLKEDYFKKIECFDSVEISGVEDRFNASLGTYHDLLKIIKDKDFLDNEENEDILEDIVLTLTLFEDREMIEERLKTYAHLFDDKVMKQLKRRRYTGWGRLSRKLINGIRDKQSGKTILDFLKSDGFANRNFMQLIHDDSLTFKEDIQKAQVSGQGDSLHEHIANLAGSPAIKKGILQTVKVVDELVKVMGRHKPENIVIEMARENQTTQKGQKNSRERMKRIEEGIKELGSQILKEHPVENTQLQNEKLYLYYLQNGRDMYVDQELDINRLSDYDVDHIVPQSFLKDDSIDNKVLTRSDKNRGKSDNVPSEEVVKKMKNYWRQLLNAKLITQRKFDNLTKAERGGLSELDKAGFIKRQLVETRQITKHVAQILDSRMNTKYDENDKLIREVKVITLKSKLVSDFRKDFQFYKVREINNYHHAHDAYLNAVVGTALIKKYPKLESEFVYGDYKVYDVRKMIAKSEQEIGSSGSETPGTSESATPESSGSEVEFSHEYWMRHALTLAKRARDEREVPVGAVLVLNNRVIGEGWNRAIGLHDPTAHAEIMALRQGGLVMQNYRLYDATLYSTFEPCVMCAGAMIHSRIGRVVFGVRNAKTGAAGSLMDVLHHPGMNHRVEITEGILADECAALLCRFFRMPRRVFNAQKKAQSSTDGKATAKYFFYSNIMNFFKTEITLANGEIRKRPLIETNGETGEIVWDKGRDFATVRKVLSMPQVNIVKKTEVQTGGFSKESILPKRNSDKLIARKKDWDPKKYGGFVSPTVAYSVLVVAKVEKGKSKKLKSVKELLGITIMERSSFEKNPIDFLEAKGYKEVKKDLIIKLPKYSLFELENGRKRMLASARELQKGNELALPSKYVNFLYLASHYEKLKGSPEDNEQKQLFVEQHKHYLDEIIEQISEFSKRVILADANLDKVLSAYNKHRDKPIREQAENIIHLFTLTNLGAPAAFKYFDTTIDRKQYRSTKEVLDATLIHQSITGLYETRIDLSQLGGDEGADKRTADGSEFESPKKKRKV

SEQ ID NO: 636 - DNA, 4731 bp, synthetic construct
  source 1..4731: mol_type = other DNA
atggacaagaagtactctatcggactggccatcggcaccaactctgttggatgggccgtgatcaccgacgagtacaaggtgcccagcaagaaattcaaggtgctgggcaacaccgaccggcacagcatcaagaagaatctgatcggcgccctgctgttcgactctggcgaaacagccgaagccaccagactgaagagaaccgccaggcggagatacacccggcggaagaaccggatctgctacctgcaagagatcttcagcaacgagatggccaaggtggacgacagcttcttccacagactggaagagtccttcctggtggaagaggacaagaagcacgagcggcaccccatcttcggcaacatcgtggatgaggtggcctaccacgagaagtaccccaccatctaccacctgagaaagaaactggtggacagcaccgacaaggccgacctgagactgatctacctggctctggcccacatgatcaagttccggggccactttctgatcgagggcgatctgaaccccgacaacagcgacgtggacaagctgttcatccagctggtgcagacctacaaccagctgttcgaggaaaaccccatcaacgcctctggcgtggacgccaaggctatcctgtctgccagactgagcaagagcagaaggctggaaaacctgatcgcccagctgcctggcgagaagaagaatggcctgttcggcaacctgattgccctgagcctgggactgacccctaacttcaagagcaacttcgacctggccgaggatgccaaactgcagctgagcaaggacacctacgacgacgacctggacaatctgctggcccagatcggcgatcagtacgccgacttgtttctggccgccaagaacctgtccgacgccatcctgctgagcgatatcctgagagtgaacaccgagatcacaaaggcccctctgagcgcctctatgatcaagagatacgacgagcaccaccaggatctgaccctgctgaaggccctcgttagacagcagctgccagagaagtacaaagagattttcttcgatcagtccaagaacggctacgccggctacattgatggcggagccagccaagaggaattctacaagttcatcaagcccatcctggaaaagatggacggcaccgaggaactgctggtcaagctgaacagagaggacctgctgcggaagcagcggaccttcgacaatggctctatccctcaccagatccacctgggagagctgcacgccattctgcggagacaagaggacttttacccattcctgaaggacaaccgggaaaagatcgagaagatcctgaccttcaggatcccctactacgtgggaccactggccagaggcaatagcagattcgcctggatgaccagaaagagcgaggaaaccatcacaccctggaacttcgaggaagtggtggacaagggcgccagcgctcagtccttcatcgagcggatgaccaacttcgataagaacctgcctaacgagaaggtgctgcccaagcactccctgctgtatgagtacttcaccgtgtacaacgagctgaccaaagtgaaatacgtgaccgagggaatgagaaagcccgcctttctgagcggcgagcagaaaaaggccattgtggatctgctgttcaagaccaaccggaaagtgaccgtgaagcagctgaaagaggactacttcaagaaaatcgagtgcttcgacagcgtggaaatcagcggcgtggaagatcggttcaatgccagcctgggcacataccacgacctgctgaaaattatcaaggacaaggacttcctggacaacgaagagaacgaggacattctcgaggacatcgtgctgaccctgacactgtttgaggacagagagatgatcgaggaacggctgaaaacatacgcccacctgttcgacgacaaagtgatgaagcaactgaagcggaggcggtacacaggctggggcagactgtctcggaagctgatcaacggcatccgggataagcagtccggcaagacaatcctggatttcctgaagtccgacggcttcgccaacagaaacttcatgcagctgatccacgacgacagcctgacctttaaagaggacatccagaaagcccaggtgtccggccaaggcgattctctgcacgagcacattgccaacctggccggatctcccgccattaagaagggcatcctgcagacagtgaaggtggtggacgagcttgtgaaagtgatgggcagacacaagcccgagaacatcgtgatcgaaatggccagagagaaccagaccacacagaagggccagaagaacagccgcgagagaatgaagcggatcgaagagggcatcaaagagctgggcagccagatcctgaaagaacaccccgtggaaaacacccagctgcagaacgagaagctgtacctgtactacctgcagaatggacgggatatgtacgtggaccaagagctggacatcaaccggctgagcgactacgatgtggaccatatcgtgccccagagctttctgaaggacgactccatcgataacaaggtcctgaccagaagcgacaagaaccggggcaagagcgataacgtgccctccgaagaggtggtcaagaagatgaagaactactggcgacagctgctgaacgccaagctgattacccagcggaagttcgataacctgaccaaggccgagagaggcggcctgagcgaacttgataaggccggcttcattaagcggcagctggtggaaacccggcagatcaccaaacacgtggcacagattctggactcccggatgaacactaagtacgacgagaatgacaagctgatccgggaagtgaaagtcatcaccctgaagtctaagctggtgtccgatttccggaaggatttccagttctacaaagtgcgggaaatcaacaactaccatcacgcccacgacgcctacctgaatgccgttgttggaacagccctgatcaagaagtatcccaagctggaaagcgagttcgtgtacggcgactacaaggtgtacgacgtgcggaagatgatcgccaagagcgaacaagagatcggatcttctggaagcgaaaccccaggcaccagcgagtctgccacaccagaatcatctggcagcgaggtcgagttctctcacgaatattggatgagacacgctctcaccctggctaagagagccagggacgaaagagaggtgccagttggcgctgtcctggtgttgaacaatcgcgtcatcggagaaggatggaatcgcgccattggcctgcacgatccaaccgcacatgccgaaattatggctctgcggcaaggcggcctcgtgatgcaaaattacagactgtacgatgctaccctctactccaccttcgagccctgtgtcatgtgtgctggggcaatgattcactcccggattggccgcgtggtgtttggagtgcggaatgccaagactggcgccgctggatctctgatggacgtcctgcaccatcctgggatgaaccaccgggtcgagatcacagagggaattctggctgacgagtgcgctgccctgctgtgcaggttctttagaatgcctagaagggtgttcaacgcccagaaaaaagctcagagcagcaccgatggcaaggctaccgccaagtactttttctacagcaacatcatgaactttttcaagacagagatcaccctggccaacggcgagatccggaaaagacccctgatcgagacaaacggcgaaaccggggagatcgtgtgggataagggcagagattttgccacagtgcggaaagtgctgagcatgccccaagtgaatatcgtgaagaaaaccgaggtgcagacaggcggcttcagcaaagagtctatcctgcctaagcggaacagcgataagctgatcgccagaaagaaggactgggaccccaagaaatacggcggcttcgtgtctcctaccgtggcctattctgtgctggtggtggccaaagtggaaaagggcaagtccaaaaagctcaagagcgtgaaagagctgctggggatcaccatcatggaaagaagcagctttgagaagaacccgatcgactttctggaagccaagggctacaaagaagtcaagaaggacctcatcatcaagctccccaagtacagcctgttcgagctggaaaatggccggaagcggatgctggcctctgctagagaactgcagaagggaaacgagctggccctgcctagcaaatatgtgaacttcctgtacctggccagccactatgagaagctgaagggcagccccgaggacaatgagcaaaagcagctgtttgtggaacagcacaagcactacctggacgagatcatcgagcagatcagcgagttctccaagagagtgatcctggccgacgctaacctggataaggtgctgtctgcctataacaagcaccgggacaagcctatcagagagcaggccgagaatatcatccacctgtttaccctgaccaacctgggagcccctgccgccttcaagtacttcgacaccaccatcgaccggaagcagtaccggtccaccaaagaggtgctggacgccacactgatccaccagtctatcaccggcctgtacgaaacccggatcgacctgtctcagctcggaggcgacgaaggcgccgataagagaaccgccgatggctctgagttcgagagccccaagaaaaagcgcaaagtgtaa

SEQ ID NO: 637 - protein, 1576 aa, synthetic construct
MDKKYSIGLAIGTNSVGWAVITDEYKVPSKKFKVLGNTDRHSIKKNLIGALLFDSGETAEATRLKRTARRRYTRRKNRICYLQEIFSNEMAKVDDSFFHRLEESFLVEEDKKHERHPIFGNIVDEVAYHEKYPTIYHLRKKLVDSTDKADLRLIYLALAHMIKFRGHFLIEGDLNPDNSDVDKLFIQLVQTYNQLFEENPINASGVDAKAILSARLSKSRRLENLIAQLPGEKKNGLFGNLIALSLGLTPNFKSNFDLAEDAKLQLSKDTYDDDLDNLLAQIGDQYADLFLAAKNLSDAILLSDILRVNTEITKAPLSASMIKRYDEHHQDLTLLKALVRQQLPEKYKEIFFDQSKNGYAGYIDGGASQEEFYKFIKPILEKMDGTEELLVKLNREDLLRKQRTFDNGSIPHQIHLGELHAILRRQEDFYPFLKDNREKIEKILTFRIPYYVGPLARGNSRFAWMTRKSEETITPWNFEEVVDKGASAQSFIERMTNFDKNLPNEKVLPKHSLLYEYFTVYNELTKVKYVTEGMRKPAFLSGEQKKAIVDLLFKTNRKVTVKQLKEDYFKKIECFDSVEISGVEDRFNASLGTYHDLLKIIKDKDFLDNEENEDILEDIVLTLTLFEDREMIEERLKTYAHLFDDKVMKQLKRRRYTGWGRLSRKLINGIRDKQSGKTILDFLKSDGFANRNFMQLIHDDSLTFKEDIQKAQVSGQGDSLHEHIANLAGSPAIKKGILQTVKVVDELVKVMGRHKPENIVIEMARENQTTQKGQKNSRERMKRIEEGIKELGSQILKEHPVENTQLQNEKLYLYYLQNGRDMYVDQELDINRLSDYDVDHIVPQSFLKDDSIDNKVLTRSDKNRGKSDNVPSEEVVKKMKNYWRQLLNAKLITQRKFDNLTKAERGGLSELDKAGFIKRQLVETRQITKHVAQILDSRMNTKYDENDKLIREVKVITLKSKLVSDFRKDFQFYKVREINNYHHAHDAYLNAVVGTALIKKYPKLESEFVYGDYKVYDVRKMIAKSEQEIGKATAKYFFYSNIMNFFKTEITLANGEIRKRPLIETNGETGEIVWDKGRDFATVRKVLSMPQVNIVKKTEVQTGGFSKESILPKRNSDKLIARKKDWDPKKYGGFVSPTVAYSVLVVAKVEKGKSKKLKSVKELLGITIMERSSFEKNPIDFLEAKGYKEVKKDLIIKLPKYSLFELENGRKRMLASARELQKGNELALPSKYVNFLYLASHYEKLKGGSSGSETPGTSESATPESSGSEVEFSHEYWMRHALTLAKRARDEREVPVGAVLVLNNRVIGEGWNRAIGLHDPTAHAEIMALRQGGLVMQNYRLYDATLYSTFEPCVMCAGAMIHSRIGRVVFGVRNAKTGAAGSLMDVLHHPGMNHRVEITEGILADECAALLCRFFRMPRRVFNAQKKAQSSTDSPEDNEQKQLFVEQHKHYLDEIIEQISEFSKRVILADANLDKVLSAYNKHRDKPIREQAENIIHLFTLTNLGAPAAFKYFDTTIDRKQYRSTKEVLDATLIHQSITGLYETRIDLSQLGGDEGADKRTADGSEFESPKKKRKV

SEQ ID NO: 638 - DNA, 4731 bp, synthetic construct
  source 1..4731: mol_type = other DNA
atggacaagaagtactctatcggactggccatcggcaccaactctgttggatgggccgtgatcaccgacgagtacaaggtgcccagcaagaaattcaaggtgctgggcaacaccgaccggcacagcatcaagaagaatctgatcggcgccctgctgttcgactctggcgaaacagccgaagccaccagactgaagagaaccgccaggcggagatacacccggcggaagaaccggatctgctacctgcaagagatcttcagcaacgagatggccaaggtggacgacagcttcttccacagactggaagagtccttcctggtggaagaggacaagaagcacgagcggcaccccatcttcggcaacatcgtggatgaggtggcctaccacgagaagtaccccaccatctaccacctgagaaagaaactggtggacagcaccgacaaggccgacctgagactgatctacctggctctggcccacatgatcaagttccggggccactttctgatcgagggcgatctgaaccccgacaacagcgacgtggacaagctgttcatccagctggtgcagacctacaaccagctgttcgaggaaaaccccatcaacgcctctggcgtggacgccaaggctatcctgtctgccagactgagcaagagcagaaggctggaaaacctgatcgcccagctgcctggcgagaagaagaatggcctgttcggcaacctgattgccctgagcctgggactgacccctaacttcaagagcaacttcgacctggccgaggatgccaaactgcagctgagcaaggacacctacgacgacgacctggacaatctgctggcccagatcggcgatcagtacgccgacttgtttctggccgccaagaacctgtccgacgccatcctgctgagcgatatcctgagagtgaacaccgagatcacaaaggcccctctgagcgcctctatgatcaagagatacgacgagcaccaccaggatctgaccctgctgaaggccctcgttagacagcagctgccagagaagtacaaagagattttcttcgatcagtccaagaacggctacgccggctacattgatggcggagccagccaagaggaattctacaagttcatcaagcccatcctggaaaagatggacggcaccgaggaactgctggtcaagctgaacagagaggacctgctgcggaagcagcggaccttcgacaatggctctatccctcaccagatccacctgggagagctgcacgccattctgcggagacaagaggacttttacccattcctgaaggacaaccgggaaaagatcgagaagatcctgaccttcaggatcccctactacgtgggaccactggccagaggcaatagcagattcgcctggatgaccagaaagagcgaggaaaccatcacaccctggaacttcgaggaagtggtggacaagggcgccagcgctcagtccttcatcgagcggatgaccaacttcgataagaacctgcctaacgagaaggtgctgcccaagcactccctgctgtatgagtacttcaccgtgtacaacgagctgaccaaagtgaaatacgtgaccgagggaatgagaaagcccgcctttctgagcggcgagcagaaaaaggccattgtggatctgctgttcaagaccaaccggaaagtgaccgtgaagcagctgaaagaggactacttcaagaaaatcgagtgcttcgacagcgtggaaatcagcggcgtggaagatcggttcaatgccagcctgggcacataccacgacctgctgaaaattatcaaggacaaggacttcctggacaacgaagagaacgaggacattctcgaggacatcgtgctgaccctgacactgtttgaggacagagagatgatcgaggaacggctgaaaacatacgcccacctgttcgacgacaaagtgatgaagcaactgaagcggaggcggtacacaggctggggcagactgtctcggaagctgatcaacggcatccgggataagcagtccggcaagacaatcctggatttcctgaagtccgacggcttcgccaacagaaacttcatgcagctgatccacgacgacagcctgacctttaaagaggacatccagaaagcccaggtgtccggccaaggcgattctctgcacgagcacattgccaacctggccggatctcccgccattaagaagggcatcctgcagacagtgaaggtggtggacgagcttgtgaaagtgatgggcagacacaagcccgagaacatcgtgatcgaaatggccagagagaaccagaccacacagaagggccagaagaacagccgcgagagaatgaagcggatcgaagagggcatcaaagagctgggcagccagatcctgaaagaacaccccgtggaaaacacccagctgcagaacgagaagctgtacctgtactacctgcagaatggacgggatatgtacgtggaccaagagctggacatcaaccggctgagcgactacgatgtggaccatatcgtgccccagagctttctgaaggacgactccatcgataacaaggtcctgaccagaagcgacaagaaccggggcaagagcgataacgtgccctccgaagaggtggtcaagaagatgaagaactactggcgacagctgctgaacgccaagctgattacccagcggaagttcgataacctgaccaaggccgagagaggcggcctgagcgaacttgataaggccggcttcattaagcggcagctggtggaaacccggcagatcaccaaacacgtggcacagattctggactcccggatgaacactaagtacgacgagaatgacaagctgatccgggaagtgaaagtcatcaccctgaagtctaagctggtgtccgatttccggaaggatttccagttctacaaagtgcgggaaatcaacaactaccatcacgcccacgacgcctacctgaatgccgttgttggaacagccctgatcaagaagtatcccaagctggaaagcgagttcgtgtacggcgactacaaggtgtacgacgtgcggaagatgatcgccaagagcgaacaagagatcggcaaggctaccgccaagtactttttctacagcaacatcatgaactttttcaagacagagatcaccctggccaacggcgagatccggaaaagacccctgatcgagacaaacggcgaaaccggggagatcgtgtgggataagggcagagattttgccacagtgcggaaagtgctgagcatgccccaagtgaatatcgtgaagaaaaccgaggtgcagacaggcggcttcagcaaagagtctatcctgcctaagcggaacagcgataagctgatcgccagaaagaaggactgggaccccaagaaatacggcggcttcgtgtctcctaccgtggcctattctgtgctggtggtggccaaagtggaaaagggcaagtccaaaaagctcaagagcgtgaaagagctgctggggatcaccatcatggaaagaagcagctttgagaagaacccgatcgactttctggaagccaagggctacaaagaagtcaagaaggacctcatcatcaagctccccaagtacagcctgttcgagctggaaaatggccggaagcggatgctggcctctgctagagaactgcagaagggaaacgagctggccctgcctagcaaatatgtgaacttcctgtacctggccagccactatgagaagctgaagggcggatcttctggaagcgaaaccccaggcaccagcgagtctgccacaccagaatcatctggcagcgaggtcgagttctctcacgaatattggatgagacacgctctcaccctggctaagagagccagggacgaaagagaggtgccagttggcgctgtcctggtgttgaacaatcgcgtcatcggagaaggatggaatcgcgccattggcctgcacgatccaaccgcacatgccgaaattatggctctgcggcaaggcggcctcgtgatgcaaaattacagactgtacgatgctaccctctactccaccttcgagccctgtgtcatgtgtgctggggcaatgattcactcccggattggccgcgtggtgtttggagtgcggaatgccaagactggcgccgctggatctctgatggacgtcctgcaccatcctgggatgaaccaccgggtcgagatcacagagggaattctggctgacgagtgcgctgccctgctgtgcaggttctttagaatgcctagaagggtgttcaacgcccagaaaaaagctcagagcagcaccgatagccccgaggacaatgagcaaaagcagctgtttgtggaacagcacaagcactacctggacgagatcatcgagcagatcagcgagttctccaagagagtgatcctggccgacgctaacctggataaggtgctgtctgcctataacaagcaccgggacaagcctatcagagagcaggccgagaatatcatccacctgtttaccctgaccaacctgggagcccctgccgccttcaagtacttcgacaccaccatcgaccggaagcagtaccggtccaccaaagaggtgctggacgccacactgatccaccagtctatcaccggcctgtacgaaacccggatcgacctgtctcagctcggaggcgacgaaggcgccgataagagaaccgccgatggctctgagttcgagagccccaagaaaaagcgcaaagtgtaa

SEQ ID NO: 639 - protein, 1576 aa, synthetic construct
MDKKYSIGLAIGTNSVGWAVITDEYKVPSKKFKVLGNTDRHSIKKNLIGALLFDSGETAEATRLKRTARRRYTRRKNRICYLQEIFSNEMAKVDDSFFHRLEESFLVEEDKKHERHPIFGNIVDEVAYHEKYPTIYHLRKKLVDSTDKADLRLIYLALAHMIKFRGHFLIEGDLNPDNSDVDKLFIQLVQTYNQLFEENPINASGVDAKAILSARLSKSRRLENLIAQLPGEKKNGLFGNLIALSLGLTPNFKSNFDLAEDAKLQLSKDTYDDDLDNLLAQIGDQYADLFLAAKNLSDAILLSDILRVNTEITKAPLSASMVKRYDEHHQDLTLLKALVRQQLPEKYKEIFFDQSKNGYAGYIDGGASQEEFYKFIKPILEKMDGTEELLVKLNREDLLRKQRTFDNGIIPHQIHLGELHAILRRQGDFYPFLKDNREKIEKILTFRIPYYVGPLARGNSRFAWMTRKSEETITPWNFEEVVDKGASAQSFIERMTNFDKNLPNEKVLPKHSLLYEYFTVYNELTKVKYVTEGMRKPAFLSGEQKKAIVDLLFKTNRKVTVKQLKEDYFKKIECFDSVEISGVEDRFNASLGTYHDLLKIIKDKDFLDNEENEDILEDIVLTLTLFEDREMIEERLKTYAHLFDDKVMKQLKRLRYTGWGRLSRKLINGIRDKQSGKTILDFLKSDGFANRNFMQLIHDDSLTFKEDIQKAQVSGQGDSLHEHIANLAGSPAIKKGILQTVKVVDELVKVMGGHKPENIVIEMARENQTTQKGQKNSRERMKRIEEGIKELGSQILKEHPVENTQLQNEKLYLYYLQNGRDMYVDQELDINRLSDYDVDHIVPQSFLKDDSIDNKVLTRSDKNRGKSDNVPSEEVVKKMKNYWRQLLNAKLITQRKFDNLTKAERGGLSELDKAGFIKRQLVETRQITKHVAQILDSRMNTKYDENDKLIREVKVITLKSKLVSDFRKDFQFYKVREINNYHHAHDAYLNAVVGTALIKKYPKLESEFVYGDYKVYDVRKMIAKSEGSSGSETPGTSESATPESSGSEVEFSHEYWMRHALTLAKRARDEREVPVGAVLVLNNRVIGEGWNRAIGLHDPTAHAEIMALRQGGLVMQNYRLYDATLYSTFEPCVMCAGAMIHSRIGRVVFGVRNAKTGAAGSLMDVLHHPGMNHRVEITEGILADECAALLCRFFRMPRRVFNAQKKAQSSTDQEIGKATAKYFFYSNIMNFFKTEITLANGEIRKRPLIETNGETGEIVWDKGRDFATVRKVLSMPQVNIVKKTEVQTGGFSKESILPKGNSDKLIARKKDWDPKKYGGFMQPTVAYSVLVVAKVEKGKSKKLKSVKELLGITIMERSSFEKNPIDFLEAKGYKEVKKDLIIKLPKYSLFELENGRKRMLASAKFLQKGNELALPSKYVNFLYLASHYEKLKGSPEDNEQKQLFVEQHKHYLDEIIEQISEFSKRVILADANLDKVLSAYNKHRDKPIREQAENIIHLFTLTNLGAPRAFKYFDTTIARKEYRSTKEVLDATLIHQSITGLYETRIDLSQLGGDEGADKRTADGSEFESPKKKRKV

SEQ ID NO: 640 - DNA, 4731 bp, synthetic construct
  source 1..4731: mol_type = other DNA
atggacaagaagtattctatcggactggccatcggcaccaactctgttggatgggccgtgatcaccgacgagtacaaggtgcccagcaagaaattcaaggtgctgggcaacaccgacaggcacagcatcaagaagaacctgatcggcgcactgctgttcgactctggcgaaacagccgaggccaccagactgaagagaacagcccgcagacggtacaccagaagaaagaaccggatctgctacctccaagagatcttcagcaacgagatggccaaggtggacgacagcttcttccacagactggaagagtccttcctggtggaagaggacaagaagcacgagagacaccccatcttcggcaacatcgtggacgaggtggcctaccacgagaagtaccccaccatctaccacctgagaaagaaactggtggacagcaccgacaaggccgacctgagactgatctatctggccctggctcacatgatcaagttccggggccacttcctgatcgagggcgacctgaatcctgacaacagcgacgtggacaagctgttcatccagctggtgcagacctacaaccagctgttcgaggaaaaccccatcaacgccagcggagtggatgccaaggccatcctgtctgccagactgagcaagagcagacggctggaaaatctgatcgcccagctgcctggcgagaagaagaatggcctgttcggcaacctgattgccctgagcctgggcctgacacctaacttcaagagcaacttcgacctggccgaggacgccaaactgcagctgagcaaggacacctacgacgacgacctggacaatctgctggcccagatcggcgatcagtacgccgacttgtttctggccgccaagaatctgagcgacgccatcctgctgtccgacatcctgagagtgaacaccgagatcaccaaggcacctctgagcgcctctatggtcaagagatacgacgagcaccaccaggatctgaccctgctgaaggccctcgttagacagcagctgccagagaagtacaaagagattttcttcgaccagagcaagaacggctacgccggctacattgatggcggagccagccaagaggaattctacaagttcatcaagcccatcctcgagaagatggacggcaccgaggaactgctggtcaagctgaacagagaggacctgctgagaaagcagagaaccttcgacaacggcatcatccctcaccagatccacctgggagaactgcacgccattctgcggagacaaggggacttttacccattcctgaaggacaaccgggaaaagatcgagaaaatcctgaccttcaggatcccctactacgtgggaccactggccagaggcaatagcagattcgcctggatgaccagaaagagcgaggaaaccatcactccctggaacttcgaggaagtggtggacaagggcgccagcgctcagtccttcatcgagcggatgaccaacttcgataagaacctgcctaacgagaaggtgctgcccaagcacagcctgctgtacgagtacttcaccgtgtacaacgagctgaccaaagtgaaatacgtgaccgagggaatgagaaagcccgcctttctgagcggcgagcagaaaaaggccatcgtggatctgctgttcaagaccaaccggaaagtgaccgtgaagcagctgaaagaggactacttcaagaaaatcgagtgcttcgacagcgtcgagatctccggcgtggaagatcggttcaatgccagcctgggcacataccacgatctgctgaaaattatcaaggacaaggacttcctggacaacgaagagaacgaggacatccttgaggacatcgtgctgacactgaccctgtttgaggacagagagatgatcgaggaacggctgaaaacatacgcccacctgttcgacgacaaagtgatgaagcaactgaagcggctgagatacaccggctggggcagactgtctcggaagctgatcaacggcatccgggataagcagtccggcaagaccatcctggactttctgaagtccgacggcttcgccaacagaaacttcatgcagctgattcacgacgacagcctcaccttcaaagaggatatccagaaagcccaggtgtccggccagggcgattctctgcatgagcacattgccaacctggccggctctcccgccattaagaaaggcatcctgcagacagtgaaggtggtggacgagcttgtgaaagtgatgggcggacacaagcccgagaacatcgtgatcgaaatggccagagagaaccagaccacacagaagggacagaagaacagccgcgagagaatgaagcggatcgaagagggcatcaaagagctgggcagccagatcctgaaagaacaccccgtggaaaacacccagctgcagaacgagaagctgtacctgtactacctgcagaatggacgggatatgtacgtggaccaagagctggacatcaacagactgtccgactacgatgtggaccatatcgtgccccagtcttttctgaaggacgactccatcgacaacaaggtcctgaccagatccgacaagaatcggggcaagagcgacaacgtgccctccgaagaggtggtcaagaagatgaagaactactggcgacagctgctgaacgccaagctgattacccagcggaagttcgacaatctgaccaaggccgaaagaggcggcctgagcgaactggataaggccggcttcatcaagagacagctggtggaaacccggcagatcacaaagcacgtggcacagattctggactctcggatgaacactaagtacgacgagaacgacaaactgatccgcgaagtgaaagtcatcaccctgaagtccaagctggtgtccgatttccggaaggatttccagttctacaaagtgcgcgagatcaacaactaccatcacgcccacgacgcctacctgaatgccgttgttggaacagccctgatcaaaaagtaccctaagctggaaagcgagttcgtgtacggcgactacaaggtgtacgacgtgcggaagatgatcgccaagagcgagggatcttctggaagcgaaaccccaggcaccagcgagtctgccacaccagaatcatctggcagcgaggtcgagttctctcacgaatattggatgagacacgctctcaccctggctaagagagccagggacgaaagagaggtgccagttggcgctgtcctggtgttgaacaatcgcgtcatcggagaaggatggaatcgcgccattggcctgcacgatccaaccgcacatgccgaaattatggctctgcggcaaggcggcctcgtgatgcaaaattacagactgtacgatgctaccctctactccaccttcgagccctgtgtcatgtgtgctggggcaatgattcactcccggattggccgcgtggtgtttggagtgcggaatgccaagactggcgccgctggatctctgatggacgtcctgcaccatcctgggatgaaccaccgggtcgagatcacagagggaattctggctgacgagtgcgctgccctgctgtgcaggttctttagaatgcctagaagggtgttcaacgcccagaaaaaagctcagagcagcaccgatcaagagattggcaaggcaaccgccaagtacttcttctacagcaacatcatgaactttttcaagacagagatcaccctcgccaacggcgagatcagaaagcggcctctgatcgagacaaacggcgaaaccggcgagattgtgtgggataagggcagagactttgccacagtgcggaaagtgctgagcatgccccaagtgaatatcgtgaagaaaaccgaggtgcagacaggcggcttcagcaaagagtctatcctgcctaaggggaactccgacaagctgatcgccagaaagaaggactgggaccccaagaaatacggcggctttatgcagcccaccgtggcctattctgttctggtggtggccaaagtggaaaagggcaagtccaagaaactcaagagcgtgaaagagctgctggggatcaccatcatggaaagaagcagcttcgagaagaatccgatcgatttcctcgaggccaagggttacaaagaagtgaaaaaggacctgatcatcaagctccccaagtactccctgttcgagctggaaaacggccggaagagaatgctggcctctgccaagttcctgcagaagggaaacgaactggccctgcctagcaaatatgtgaacttcctgtacctggccagccactatgagaagctgaagggcagccccgaggacaatgagcaaaagcagctgtttgtggaacagcacaagcactacctggacgagatcatcgagcagatcagcgagtttagcaagagagtgattctggccgacgccaatctggacaaagtgctgtccgcctacaacaagcaccgggacaagcctatcagagagcaggccgagaatatcatccacctgtttaccctgaccaacctgggagcccctagagccttcaagtactttgacaccaccatcgcccggaaggagtaccggtccaccaaagaggtgctggacgccactctgatccaccagtctatcaccggcctgtacgagacacggatcgacctgtctcaactcggaggcgacgaaggcgccgataagagaaccgccgatggctctgagttcgagagccccaagaaaaagcgcaaagtgtaa

SEQ ID NO: 641 - protein, 1576 aa, synthetic construct
MDKKYSIGLAIGTNSVGWAVITDEYKVPSKKFKVLGNTDRHSIKKNLIGALLFDSGETAEATRLKRTARRRYTRRKNRICYLQEIFSNEMAKVDDSFFHRLEESFLVEEDKKHERHPIFGNIVDEVAYHEKYPTIYHLRKKLVDSTDKADLRLIYLALAHMIKFRGHFLIEGDLNPDNSDVDKLFIQLVQTYNQLFEENPINASGVDAKAILSARLSKSRRLENLIAQLPGEKKNGLFGNLIALSLGLTPNFKSNFDLAEDAKLQLSKDTYDDDLDNLLAQIGDQYADLFLAAKNLSDAILLSDILRVNTEITKAPLSASMVKRYDEHHQDLTLLKALVRQQLPEKYKEIFFDQSKNGYAGYIDGGASQEEFYKFIKPILEKMDGTEELLVKLNREDLLRKQRTFDNGIIPHQIHLGELHAILRRQGDFYPFLKDNREKIEKILTFRIPYYVGPLARGNSRFAWMTRKSEETITPWNFEEVVDKGASAQSFIERMTNFDKNLPNEKVLPKHSLLYEYFTVYNELTKVKYVTEGMRKPAFLSGEQKKAIVDLLFKTNRKVTVKQLKEDYFKKIECFDSVEISGVEDRFNASLGTYHDLLKIIKDKDFLDNEENEDILEDIVLTLTLFEDREMIEERLKTYAHLFDDKVMKQLKRLRYTGWGRLSRKLINGIRDKQSGKTILDFLKSDGFANRNFMQLIHDDSLTFKEDIQKAQVSGQGDSLHEHIANLAGSPAIKKGILQTVKVVDELVKVMGGHKPENIVIEMARENQTTQKGQKNSRERMKRIEEGIKELGSQILKEHPVENTQLQNEKLYLYYLQNGRDMYVDQELDINRLSDYDVDHIVPQSFLKDDSIDNKVLTRSDKNRGKSDNVPSEEVVKKMKNYWRQLLNAKLITQRKFDNLTKAERGGLSELDKAGFIKRQLVETRQITKHVAQILDSRMNTKYDENDKLIREVKVITLKSKLVSDFRKDFQFYKVREINNYHHAHDAYLNAVVGTALIKKYPKLESEFVYGDYKVYDVRKMIAKSEQEIGSSGSETPGTSESATPESSGSEVEFSHEYWMRHALTLAKRARDEREVPVGAVLVLNNRVIGEGWNRAIGLHDPTAHAEIMALRQGGLVMQNYRLYDATLYSTFEPCVMCAGAMIHSRIGRVVFGVRNAKTGAAGSLMDVLHHPGMNHRVEITEGILADECAALLCRFFRMPRRVFNAQKKAQSSTDGKATAKYFFYSNIMNFFKTEITLANGEIRKRPLIETNGETGEIVWDKGRDFATVRKVLSMPQVNIVKKTEVQTGGFSKESILPKGNSDKLIARKKDWDPKKYGGFMQPTVAYSVLVVAKVEKGKSKKLKSVKELLGITIMERSSFEKNPIDFLEAKGYKEVKKDLIIKLPKYSLFELENGRKRMLASAKFLQKGNELALPSKYVNFLYLASHYEKLKGSPEDNEQKQLFVEQHKHYLDEIIEQISEFSKRVILADANLDKVLSAYNKHRDKPIREQAENIIHLFTLTNLGAPRAFKYFDTTIARKEYRSTKEVLDATLIHQSITGLYETRIDLSQLGGDEGADKRTADGSEFESPKKKRKV

SEQ ID NO: 642 - DNA, 4731 bp, synthetic construct
  source 1..4731: mol_type = other DNA
atggacaagaagtattctatcggactggccatcggcaccaactctgttggatgggccgtgatcaccgacgagtacaaggtgcccagcaagaaattcaaggtgctgggcaacaccgacaggcacagcatcaagaagaacctgatcggcgcactgctgttcgactctggcgaaacagccgaggccaccagactgaagagaacagcccgcagacggtacaccagaagaaagaaccggatctgctacctccaagagatcttcagcaacgagatggccaaggtggacgacagcttcttccacagactggaagagtccttcctggtggaagaggacaagaagcacgagagacaccccatcttcggcaacatcgtggacgaggtggcctaccacgagaagtaccccaccatctaccacctgagaaagaaactggtggacagcaccgacaaggccgacctgagactgatctatctggccctggctcacatgatcaagttccggggccacttcctgatcgagggcgacctgaatcctgacaacagcgacgtggacaagctgttcatccagctggtgcagacctacaaccagctgttcgaggaaaaccccatcaacgccagcggagtggatgccaaggccatcctgtctgccagactgagcaagagcagacggctggaaaatctgatcgcccagctgcctggcgagaagaagaatggcctgttcggcaacctgattgccctgagcctgggcctgacacctaacttcaagagcaacttcgacctggccgaggacgccaaactgcagctgagcaaggacacctacgacgacgacctggacaatctgctggcccagatcggcgatcagtacgccgacttgtttctggccgccaagaatctgagcgacgccatcctgctgtccgacatcctgagagtgaacaccgagatcaccaaggcacctctgagcgcctctatggtcaagagatacgacgagcaccaccaggatctgaccctgctgaaggccctcgttagacagcagctgccagagaagtacaaagagattttcttcgaccagagcaagaacggctacgccggctacattgatggcggagccagccaagaggaattctacaagttcatcaagcccatcctcgagaagatggacggcaccgaggaactgctggtcaagctgaacagagaggacctgctgagaaagcagagaaccttcgacaacggcatcatccctcaccagatccacctgggagaactgcacgccattctgcggagacaaggggacttttacccattcctgaaggacaaccgggaaaagatcgagaaaatcctgaccttcaggatcccctactacgtgggaccactggccagaggcaatagcagattcgcctggatgaccagaaagagcgaggaaaccatcactccctggaacttcgaggaagtggtggacaagggcgccagcgctcagtccttcatcgagcggatgaccaacttcgataagaacctgcctaacgagaaggtgctgcccaagcacagcctgctgtacgagtacttcaccgtgtacaacgagctgaccaaagtgaaatacgtgaccgagggaatgagaaagcccgcctttctgagcggcgagcagaaaaaggccatcgtggatctgctgttcaagaccaaccggaaagtgaccgtgaagcagctgaaagaggactacttcaagaaaatcgagtgcttcgacagcgtcgagatctccggcgtggaagatcggttcaatgccagcctgggcacataccacgatctgctgaaaattatcaaggacaaggacttcctggacaacgaagagaacgaggacatccttgaggacatcgtgctgacactgaccctgtttgaggacagagagatgatcgaggaacggctgaaaacatacgcccacctgttcgacgacaaagtgatgaagcaactgaagcggctgagatacaccggctggggcagactgtctcggaagctgatcaacggcatccgggataagcagtccggcaagaccatcctggactttctgaagtccgacggcttcgccaacagaaacttcatgcagctgattcacgacgacagcctcaccttcaaagaggatatccagaaagcccaggtgtccggccagggcgattctctgcatgagcacattgccaacctggccggctctcccgccattaagaaaggcatcctgcagacagtgaaggtggtggacgagcttgtgaaagtgatgggcggacacaagcccgagaacatcgtgatcgaaatggccagagagaaccagaccacacagaagggacagaagaacagccgcgagagaatgaagcggatcgaagagggcatcaaagagctgggcagccagatcctgaaagaacaccccgtggaaaacacccagctgcagaacgagaagctgtacctgtactacctgcagaatggacgggatatgtacgtggaccaagagctggacatcaacagactgtccgactacgatgtggaccatatcgtgccccagtcttttctgaaggacgactccatcgacaacaaggtcctgaccagatccgacaagaatcggggcaagagcgacaacgtgccctccgaagaggtggtcaagaagatgaagaactactggcgacagctgctgaacgccaagctgattacccagcggaagttcgacaatctgaccaaggccgaaagaggcggcctgagcgaactggataaggccggcttcatcaagagacagctggtggaaacccggcagatcacaaagcacgtggcacagattctggactctcggatgaacactaagtacgacgagaacgacaaactgatccgcgaagtgaaagtcatcaccctgaagtccaagctggtgtccgatttccggaaggatttccagttctacaaagtgcgcgagatcaacaactaccatcacgcccacgacgcctacctgaatgccgttgttggaacagccctgatcaaaaagtaccctaagctggaaagcgagttcgtgtacggcgactacaaggtgtacgacgtgcggaagatgatcgccaagagcgagcaagagattggatcttctggaagcgaaaccccaggcaccagcgagtctgccacaccagaatcatctggcagcgaggtcgagttctctcacgaatattggatgagacacgctctcaccctggctaagagagccagggacgaaagagaggtgccagttggcgctgtcctggtgttgaacaatcgcgtcatcggagaaggatggaatcgcgccattggcctgcacgatccaaccgcacatgccgaaattatggctctgcggcaaggcggcctcgtgatgcaaaattacagactgtacgatgctaccctctactccaccttcgagccctgtgtcatgtgtgctggggcaatgattcactcccggattggccgcgtggtgtttggagtgcggaatgccaagactggcgccgctggatctctgatggacgtcctgcaccatcctgggatgaaccaccgggtcgagatcacagagggaattctggctgacgagtgcgctgccctgctgtgcaggttctttagaatgcctagaagggtgttcaacgcccagaaaaaagctcagagcagcaccgatggcaaggcaaccgccaagtacttcttctacagcaacatcatgaactttttcaagacagagatcaccctcgccaacggcgagatcagaaagcggcctctgatcgagacaaacggcgaaaccggcgagattgtgtgggataagggcagagactttgccacagtgcggaaagtgctgagcatgccccaagtgaatatcgtgaagaaaaccgaggtgcagacaggcggcttcagcaaagagtctatcctgcctaaggggaactccgacaagctgatcgccagaaagaaggactgggaccccaagaaatacggcggctttatgcagcccaccgtggcctattctgttctggtggtggccaaagtggaaaagggcaagtccaagaaactcaagagcgtgaaagagctgctggggatcaccatcatggaaagaagcagcttcgagaagaatccgatcgatttcctcgaggccaagggttacaaagaagtgaaaaaggacctgatcatcaagctccccaagtactccctgttcgagctggaaaacggccggaagagaatgctggcctctgccaagttcctgcagaagggaaacgaactggccctgcctagcaaatatgtgaacttcctgtacctggccagccactatgagaagctgaagggcagccccgaggacaatgagcaaaagcagctgtttgtggaacagcacaagcactacctggacgagatcatcgagcagatcagcgagtttagcaagagagtgattctggccgacgccaatctggacaaagtgctgtccgcctacaacaagcaccgggacaagcctatcagagagcaggccgagaatatcatccacctgtttaccctgaccaacctgggagcccctagagccttcaagtactttgacaccaccatcgcccggaaggagtaccggtccaccaaagaggtgctggacgccactctgatccaccagtctatcaccggcctgtacgagacacggatcgacctgtctcaactcggaggcgacgaaggcgccgataagagaaccgccgatggctctgagttcgagagccccaagaaaaagcgcaaagtgtaa

SEQ ID NO: 643 - protein, 1576 aa, synthetic construct
MDKKYSIGLAIGTNSVGWAVITDEYKVPSKKFKVLGNTDRHSIKKNLIGALLFDSGETAEATRLKRTARRRYTRRKNRICYLQEIFSNEMAKVDDSFFHRLEESFLVEEDKKHERHPIFGNIVDEVAYHEKYPTIYHLRKKLVDSTDKADLRLIYLALAHMIKFRGHFLIEGDLNPDNSDVDKLFIQLVQTYNQLFEENPINASGVDAKAILSARLSKSRRLENLIAQLPGEKKNGLFGNLIALSLGLTPNFKSNFDLAEDAKLQLSKDTYDDDLDNLLAQIGDQYADLFLAAKNLSDAILLSDILRVNTEITKAPLSASMVKRYDEHHQDLTLLKALVRQQLPEKYKEIFFDQSKNGYAGYIDGGASQEEFYKFIKPILEKMDGTEELLVKLNREDLLRKQRTFDNGIIPHQIHLGELHAILRRQGDFYPFLKDNREKIEKILTFRIPYYVGPLARGNSRFAWMTRKSEETITPWNFEEVVDKGASAQSFIERMTNFDKNLPNEKVLPKHSLLYEYFTVYNELTKVKYVTEGMRKPAFLSGEQKKAIVDLLFKTNRKVTVKQLKEDYFKKIECFDSVEISGVEDRFNASLGTYHDLLKIIKDKDFLDNEENEDILEDIVLTLTLFEDREMIEERLKTYAHLFDDKVMKQLKRLRYTGWGRLSRKLINGIRDKQSGKTILDFLKSDGFANRNFMQLIHDDSLTFKEDIQKAQVSGQGDSLHEHIANLAGSPAIKKGILQTVKVVDELVKVMGGHKPENIVIEMARENQTTQKGQKNSRERMKRIEEGIKELGSQILKEHPVENTQLQNEKLYLYYLQNGRDMYVDQELDINRLSDYDVDHIVPQSFLKDDSIDNKVLTRSDKNRGKSDNVPSEEVVKKMKNYWRQLLNAKLITQRKFDNLTKAERGGLSELDKAGFIKRQLVETRQITKHVAQILDSRMNTKYDENDKLIREVKVITLKSKLVSDFRKDFQFYKVREINNYHHAHDAYLNAVVGTALIKKYPKLESEFVYGDYKVYDVRKMIAKSEQEIGKATAKYFFYSNIMNFFKTEITLANGEIRKRPLIETNGETGEIVWDKGRDFATVRKVLSMPQVNIVKKTEVQTGGFSKESILPKGNSDKLIARKKDWDPKKYGGFMQPTVAYSVLVVAKVEKGKSKKLKSVKELLGITIMERSSFEKNPIDFLEAKGYKEVKKDLIIKLPKYSLFELENGRKRMLASAKFLQKGNELALPSKYVNFLYLASHYEKLKGGSSGSETPGTSESATPESSGSEVEFSHEYWMRHALTLAKRARDEREVPVGAVLVLNNRVIGEGWNRAIGLHDPTAHAEIMALRQGGLVMQNYRLYDATLYSTFEPCVMCAGAMIHSRIGRVVFGVRNAKTGAAGSLMDVLHHPGMNHRVEITEGILADECAALLCRFFRMPRRVFNAQKKAQSSTDSPEDNEQKQLFVEQHKHYLDEIIEQISEFSKRVILADANLDKVLSAYNKHRDKPIREQAENIIHLFTLTNLGAPRAFKYFDTTIARKEYRSTKEVLDATLIHQSITGLYETRIDLSQLGGDEGADKRTADGSEFESPKKKRKV

SEQ ID NO: 644 - DNA, 4731 bp, synthetic construct
  source 1..4731: mol_type = other DNA
atggacaagaagtattctatcggactggccatcggcaccaactctgttggatgggccgtgatcaccgacgagtacaaggtgcccagcaagaaattcaaggtgctgggcaacaccgacaggcacagcatcaagaagaacctgatcggcgcactgctgttcgactctggcgaaacagccgaggccaccagactgaagagaacagcccgcagacggtacaccagaagaaagaaccggatctgctacctccaagagatcttcagcaacgagatggccaaggtggacgacagcttcttccacagactggaagagtccttcctggtggaagaggacaagaagcacgagagacaccccatcttcggcaacatcgtggacgaggtggcctaccacgagaagtaccccaccatctaccacctgagaaagaaactggtggacagcaccgacaaggccgacctgagactgatctatctggccctggctcacatgatcaagttccggggccacttcctgatcgagggcgacctgaatcctgacaacagcgacgtggacaagctgttcatccagctggtgcagacctacaaccagctgttcgaggaaaaccccatcaacgccagcggagtggatgccaaggccatcctgtctgccagactgagcaagagcagacggctggaaaatctgatcgcccagctgcctggcgagaagaagaatggcctgttcggcaacctgattgccctgagcctgggcctgacacctaacttcaagagcaacttcgacctggccgaggacgccaaactgcagctgagcaaggacacctacgacgacgacctggacaatctgctggcccagatcggcgatcagtacgccgacttgtttctggccgccaagaatctgagcgacgccatcctgctgtccgacatcctgagagtgaacaccgagatcaccaaggcacctctgagcgcctctatggtcaagagatacgacgagcaccaccaggatctgaccctgctgaaggccctcgttagacagcagctgccagagaagtacaaagagattttcttcgaccagagcaagaacggctacgccggctacattgatggcggagccagccaagaggaattctacaagttcatcaagcccatcctcgagaagatggacggcaccgaggaactgctggtcaagctgaacagagaggacctgctgagaaagcagagaaccttcgacaacggcatcatccctcaccagatccacctgggagaactgcacgccattctgcggagacaaggggacttttacccattcctgaaggacaaccgggaaaagatcgagaaaatcctgaccttcaggatcccctactacgtgggaccactggccagaggcaatagcagattcgcctggatgaccagaaagagcgaggaaaccatcactccctggaacttcgaggaagtggtggacaagggcgccagcgctcagtccttcatcgagcggatgaccaacttcgataagaacctgcctaacgagaaggtgctgcccaagcacagcctgctgtacgagtacttcaccgtgtacaacgagctgaccaaagtgaaatacgtgaccgagggaatgagaaagcccgcctttctgagcggcgagcagaaaaaggccatcgtggatctgctgttcaagaccaaccggaaagtgaccgtgaagcagctgaaagaggactacttcaagaaaatcgagtgcttcgacagcgtcgagatctccggcgtggaagatcggttcaatgccagcctgggcacataccacgatctgctgaaaattatcaaggacaaggacttcctggacaacgaagagaacgaggacatccttgaggacatcgtgctgacactgaccctgtttgaggacagagagatgatcgaggaacggctgaaaacatacgcccacctgttcgacgacaaagtgatgaagcaactgaagcggctgagatacaccggctggggcagactgtctcggaagctgatcaacggcatccgggataagcagtccggcaagaccatcctggactttctgaagtccgacggcttcgccaacagaaacttcatgcagctgattcacgacgacagcctcaccttcaaagaggatatccagaaagcccaggtgtccggccagggcgattctctgcatgagcacattgccaacctggccggctctcccgccattaagaaaggcatcctgcagacagtgaaggtggtggacgagcttgtgaaagtgatgggcggacacaagcccgagaacatcgtgatcgaaatggccagagagaaccagaccacacagaagggacagaagaacagccgcgagagaatgaagcggatcgaagagggcatcaaagagctgggcagccagatcctgaaagaacaccccgtggaaaacacccagctgcagaacgagaagctgtacctgtactacctgcagaatggacgggatatgtacgtggaccaagagctggacatcaacagactgtccgactacgatgtggaccatatcgtgccccagtcttttctgaaggacgactccatcgacaacaaggtcctgaccagatccgacaagaatcggggcaagagcgacaacgtgccctccgaagaggtggtcaagaagatgaagaactactggcgacagctgctgaacgccaagctgattacccagcggaagttcgacaatctgaccaaggccgaaagaggcggcctgagcgaactggataaggccggcttcatcaagagacagctggtggaaacccggcagatcacaaagcacgtggcacagattctggactctcggatgaacactaagtacgacgagaacgacaaactgatccgcgaagtgaaagtcatcaccctgaagtccaagctggtgtccgatttccggaaggatttccagttctacaaagtgcgcgagatcaacaactaccatcacgcccacgacgcctacctgaatgccgttgttggaacagccctgatcaaaaagtaccctaagctggaaagcgagttcgtgtacggcgactacaaggtgtacgacgtgcggaagatgatcgccaagagcgagcaagagattggcaaggcaaccgccaagtacttcttctacagcaacatcatgaactttttcaagacagagatcaccctcgccaacggcgagatcagaaagcggcctctgatcgagacaaacggcgaaaccggcgagattgtgtgggataagggcagagactttgccacagtgcggaaagtgctgagcatgccccaagtgaatatcgtgaagaaaaccgaggtgcagacaggcggcttcagcaaagagtctatcctgcctaaggggaactccgacaagctgatcgccagaaagaaggactgggaccccaagaaatacggcggctttatgcagcccaccgtggcctattctgttctggtggtggccaaagtggaaaagggcaagtccaagaaactcaagagcgtgaaagagctgctggggatcaccatcatggaaagaagcagcttcgagaagaatccgatcgatttcctcgaggccaagggttacaaagaagtgaaaaaggacctgatcatcaagctccccaagtactccctgttcgagctggaaaacggccggaagagaatgctggcctctgccaagttcctgcagaagggaaacgaactggccctgcctagcaaatatgtgaacttcctgtacctggccagccactatgagaagctgaagggcggatcttctggaagcgaaaccccaggcaccagcgagtctgccacaccagaatcatctggcagcgaggtcgagttctctcacgaatattggatgagacacgctctcaccctggctaagagagccagggacgaaagagaggtgccagttggcgctgtcctggtgttgaacaatcgcgtcatcggagaaggatggaatcgcgccattggcctgcacgatccaaccgcacatgccgaaattatggctctgcggcaaggcggcctcgtgatgcaaaattacagactgtacgatgctaccctctactccaccttcgagccctgtgtcatgtgtgctggggcaatgattcactcccggattggccgcgtggtgtttggagtgcggaatgccaagactggcgccgctggatctctgatggacgtcctgcaccatcctgggatgaaccaccgggtcgagatcacagagggaattctggctgacgagtgcgctgccctgctgtgcaggttctttagaatgcctagaagggtgttcaacgcccagaaaaaagctcagagcagcaccgatagccccgaggacaatgagcaaaagcagctgtttgtggaacagcacaagcactacctggacgagatcatcgagcagatcagcgagtttagcaagagagtgattctggccgacgccaatctggacaaagtgctgtccgcctacaacaagcaccgggacaagcctatcagagagcaggccgagaatatcatccacctgtttaccctgaccaacctgggagcccctagagccttcaagtactttgacaccaccatcgcccggaaggagtaccggtccaccaaagaggtgctggacgccactctgatccaccagtctatcaccggcctgtacgagacacggatcgacctgtctcaactcggaggcgacgaaggcgccgataagagaaccgccgatggctctgagttcgagagccccaagaaaaagcgcaaagtgtaa

SEQ ID NO: 645 - DNA, 8378 bp, synthetic construct
  source 1..8378: mol_type = other DNA
tctagagtttaaacatttaaatctgcagatcccaatggcgcgccgagcttggctcgagcatggtcatagctgtttcctgtgtgaaattgttatccgctcacaattccacacaacatacgagccggaagcataaagtgtaaagcctggggtgcctaatgagtgagctaactcacattaattgcgttgcgctcactgcccgctttccagtcgggaaacctgtcgtgccagctgcattaatgaatcggccaacgcgcggggagaggcggtttgcgtattgggcactcttgcgcttcctcgctcactgactcgctgcgctcggtcgttcggctgcggcgagcggtatcagctcactcaaaggcggtaatacggttatccacagaatcaggggataacgcaggaaagaacatgtgagcaaaaggccagcaaaaggccaggaaccgtaaaaaggccgcgttgctggcgtttttccataggctccgcccccctgacgagcatcacaaaaatcgacgctcaagtcagaggtggcgaaacccgacaggactataaagataccaggcgtttccccctggaagctccctcgtgcgctctcctgttccgaccctgccgcttaccggatacctgtccgcctttctcccttcgggaagcgtggcgctttctcatagctcacgctgtaggtatctcagttcggtgtaggtcgttcgctccaagctgggctgtgtgcacgaaccccccgttcagcccgaccgctgcgccttatccggtaactatcgtcttgagtccaacccggtaagacacgacttatcgccactggcagcagccactggtaacaggattagcagagcgaggtatgtaggcggtgctacagagttcttgaagtggtggcctaactacggctacactagaagaacagtatttggtatctgcgctctgctgaagccagttaccttcggaaaaagagttggtagctcttgatccggcaaacaaaccaccgctggtagcggtggtttttttgtttgcaagcagcagattacgcgcagaaaaaaaggatctcaagaagatcctttgatcttttctacggggtctgacgctcagtggaacgaaaactcacgttaagggattttggtcatgagattatcaaaaaggatcttcacctagatccttttaaattaaaaatgaagttttaaatcaatctaaagtatatatgagtaaacttggtctgacagttagaaaaactcatcgagcatcaaatgaaactgcaatttattcatatcaggattatcaataccatatttttgaaaaagccgtttctgtaatgaaggagaaaactcaccgaggcagttccataggatggcaagatcctggtatcggtctgcgattccgactcgtccaacatcaatacaacctattaatttcccctcgtcaaaaataaggttatcaagtgagaaatcaccatgagtgacgactgaatccggtgagaatggcaaaagtttatgcatttctttccagacttgttcaacaggccagccattacgctcgtcatcaaaatcactcgcatcaaccaaaccgttattcattcgtgattgcgcctgagcgagacgaaatacgcgatcgctgttaaaaggacaattacaaacaggaatcgaatgcaaccggcgcaggaacactgccagcgcatcaacaatattttcacctgaatcaggatattcttctaatacctggaatgctgttttcccagggatcgcagtggtgagtaaccatgcatcatcaggagtacggataaaatgcttgatggtcggaagaggcataaattccgtcagccagtttagtctgaccatctcatctgtaacatcattggcaacgctacctttgccatgtttcagaaacaactctggcgcatcgggcttcccatacaatcgatagattgtcgcacctgattgcccgacattatcgcgagcccatttatacccatataaatcagcatccatgttggaatttaatcgcggcctagagcaagacgtttcccgttgaatatggctcatactcttcctttttcaatattattgaagcatttatcagggttattgtctcatgagcggatacatatttgaatgtatttagaaaaataaacaaataggggttccgcgcacatttccccgaaaagtgccacctgacgtctaagaaaccattattatcatgacattaacctataaaaataggcgtatcacgaggccctttcgtctcgcgcgtttcggtgatgacggtgaaaacctctgacacatgcagctcccggagacggtcacagcttgtctgtaagcggatgccgggagcagacaagcccgtcagggcgcgtcagcgggtgttggcgggtgtcggggctggcttaactatgcggcatcagagcagattgtactgagagtgcaccatatgcggtgtgaaataccgcacagatgcgtaaggagaaaataccgcatcaggcgccattcgccattcaggctgcgcaactgttgggaagggcgatcggtgcgggcctcttcgctattacgccagctggcgaaagggggatgtgctgcaaggcgattaagttgggtaacgccagggttttcccagtcacgacgttgtaaaacgacggccagtgaattgacgcgtattgggatcgagctcggtacctaatacgacacactataaggaaataagagagaaaagaagagtaagaagaaatataagagccaccatgacctctgagaagggccctagcacaggcgaccccaccctgcggcggagaatcgagagctgggagttcgacgtgttctacgaccctagagaactgagaaaggaaacctgcctgctgtacgagatcaagtggggcatgagcagaaagatctggcggagctctggcaagaacaccaccaaccacgtggaagtgaatttcatcaagaagttcaccagcgagagaaggttccacagcagcatcagctgcagcatcacctggttcctgagctggtccccttgctgggaatgcagccaggccatcagagagttcctgagccaacaccccggagtgacactggtgatctacgtggccagactgttctggcacatggaccagagaaacagacagggcctgagagatctggtcaacagcggcgtgactatccagatcatgcgggccagcgagtactaccactgttggcggaacttcgtgaactacccccccggcgatgaggcccactggcctcagtaccctcctctgtggatgatgctgtacgccctggaactgcactgcatcatcctgtctctgcctccatgtctgaagatctctagaagatggcagaaccacctggccttcttcagactgcacctgcagaattgccactaccagaccatccccccccacatcctgctggctacaggcctgatccacccttctgtgacctggagaagcggaggatctagcggcggctctagcggatctgagacacctggcacaagcgagtctgccacacctgagagtagcggcggatcttctggcggctccgacaagaagtactctatcggactggccatcggcaccaactctgttggatgggccgtgatcaccgacgagtacaaggtgcccagcaagaaattcaaggtgctgggcaacaccgaccggcacagcatcaagaagaatctgatcggcgccctgctgttcgactctggcgaaacagccgaagccaccagactgaagagaaccgccaggcggagatacacccggcggaagaaccggatctgctacctgcaagagatcttcagcaacgagatggccaaggtggacgacagcttcttccacagactggaagagtccttcctggtggaagaggacaagaagcacgagcggcaccccatcttcggcaacatcgtggatgaggtggcctaccacgagaagtaccccaccatctaccacctgagaaagaaactggtggacagcaccgacaaggccgacctgagactgatctacctggctctggcccacatgatcaagttccggggccactttctgatcgagggcgatctgaaccccgacaacagcgacgtggacaagctgttcatccagctggtgcagacctacaaccagctgttcgaggaaaaccccatcaacgcctctggcgtggacgccaaggctatcctgtctgccagactgagcaagagcagaaggctggaaaacctgatcgcccagctgcctggcgagaagaagaatggcctgttcggcaacctgattgccctgagcctgggactgacccctaacttcaagagcaacttcgacctggccgaggatgccaaactgcagctgagcaaggacacctacgacgacgacctggacaatctgctggcccagatcggcgatcagtacgccgacttgtttctggccgccaagaacctgtccgacgccatcctgctgagcgatatcctgagagtgaacaccgagatcacaaaggcccctctgagcgcctctatgatcaagagatacgacgagcaccaccaggatctgaccctgctgaaggccctcgttagacagcagctgccagagaagtacaaagagattttcttcgatcagtccaagaacggctacgccggctacattgatggcggagccagccaagaggaattctacaagttcatcaagcccatcctggaaaagatggacggcaccgaggaactgctggtcaagctgaacagagaggacctgctgcggaagcagcggaccttcgacaatggctctatccctcaccagatccacctgggagagctgcacgccattctgcggagacaagaggacttttacccattcctgaaggacaaccgggaaaagatcgagaagatcctgaccttcaggatcccctactacgtgggaccactggccagaggcaatagcagattcgcctggatgaccagaaagagcgaggaaaccatcacaccctggaacttcgaggaagtggtggacaagggcgccagcgctcagtccttcatcgagcggatgaccaacttcgataagaacctgcctaacgagaaggtgctgcccaagcactccctgctgtatgagtacttcaccgtgtacaacgagctgaccaaagtgaaatacgtgaccgagggaatgagaaagcccgcctttctgagcggcgagcagaaaaaggccattgtggatctgctgttcaagaccaaccggaaagtgaccgtgaagcagctgaaagaggactacttcaagaaaatcgagtgcttcgacagcgtggaaatcagcggcgtggaagatcggttcaatgccagcctgggcacataccacgacctgctgaaaattatcaaggacaaggacttcctggacaacgaagagaacgaggacattctcgaggacatcgtgctgaccctgacactgtttgaggacagagagatgatcgaggaacggctgaaaacatacgcccacctgttcgacgacaaagtgatgaagcaactgaagcggaggcggtacacaggctggggcagactgtctcggaagctgatcaacggcatccgggataagcagtccggcaagacaatcctggatttcctgaagtccgacggcttcgccaacagaaacttcatgcagctgatccacgacgacagcctgacctttaaagaggacatccagaaagcccaggtgtccggccaaggcgattctctgcacgagcacattgccaacctggccggatctcccgccattaagaagggcatcctgcagacagtgaaggtggtggacgagcttgtgaaagtgatgggcagacacaagcccgagaacatcgtgatcgaaatggccagagagaaccagaccacacagaagggccagaagaacagccgcgagagaatgaagcggatcgaagagggcatcaaagagctgggcagccagatcctgaaagaacaccccgtggaaaacacccagctgcagaacgagaagctgtacctgtactacctgcagaatggacgggatatgtacgtggaccaagagctggacatcaaccggctgagcgactacgatgtggaccatatcgtgccccagagctttctgaaggacgactccatcgataacaaggtcctgaccagaagcgacaagaaccggggcaagagcgataacgtgccctccgaagaggtggtcaagaagatgaagaactactggcgacagctgctgaacgccaagctgattacccagcggaagttcgataacctgaccaaggccgagagaggcggcctgagcgaacttgataaggccggcttcattaagcggcagctggtggaaacccggcagatcaccaaacacgtggcacagattctggactcccggatgaacactaagtacgacgagaatgacaagctgatccgggaagtgaaagtcatcaccctgaagtctaagctggtgtccgatttccggaaggatttccagttctacaaagtgcgggaaatcaacaactaccatcacgcccacgacgcctacctgaatgccgttgttggaacagccctgatcaagaagtatcccaagctggaaagcgagttcgtgtacggcgactacaaggtgtacgacgtgcggaagatgatcgccaagagcgaacaagagatcggcaaggctaccgccaagtactttttctacagcaacatcatgaactttttcaagacagagatcaccctggccaacggcgagatccggaaaagacccctgatcgagacaaacggcgaaaccggggagatcgtgtgggataagggcagagattttgccacagtgcggaaagtgctgagcatgccccaagtgaatatcgtgaagaaaaccgaggtgcagacaggcggcttcagcaaagagtctatcctgcctaagcggaacagcgataagctgatcgccagaaagaaggactgggaccccaagaaatacggcggcttcgtgtctcctaccgtggcctattctgtgctggtggtggccaaagtggaaaagggcaagtccaaaaagctcaagagcgtgaaagagctgctggggatcaccatcatggaaagaagcagctttgagaagaacccgatcgactttctggaagccaagggctacaaagaagtcaagaaggacctcatcatcaagctccccaagtacagcctgttcgagctggaaaatggccggaagcggatgctggcctctgctagagaactgcagaagggaaacgagctggccctgcctagcaaatatgtgaacttcctgtacctggccagccactatgagaagctgaagggcagccccgaggacaatgagcaaaagcagctgtttgtggaacagcacaagcactacctggacgagatcatcgagcagatcagcgagttctccaagagagtgatcctggccgacgctaacctggataaggtgctgtctgcctataacaagcaccgggacaagcctatcagagagcaggccgagaatatcatccacctgtttaccctgaccaacctgggagcccctgccgccttcaagtacttcgacaccaccatcgaccggaagcagtaccggtccaccaaagaggtgctggacgccacactgatccaccagtctatcaccggcctgtacgaaacccggatcgacctgtctcagctcggcggcgattctggtggttctggcggaagtggcggatccaccaatctgagcgacatcatcgaaaaagagacaggcaagcagctcgtgatccaagaatccatcctgatgctgcctgaagaggttgaggaagtgatcggcaacaagcctgagtccgacatcctggtgcacaccgcctacgatgagagcaccgatgagaacgtcatgctgctgacaagcgacgcccctgagtacaagccttgggctctcgtgattcaggacagcaatggggagaacaagatcaagatgctgagcggaggtagcggaggcagtggcggaagcacaaacctgtctgatatcattgaaaaagaaaccgggaagcaactggtcattcaagagtccattctcatgctcccggaagaagtcgaggaagtcattggaaacaaacccgagagcgatattctggtccacacagcctatgacgagtctacagacgaaaacgtgatgctcctgacctctgacgctcccgagtataagccctgggcacttgttatccaggactctaacggggaaaacaaaatcaaaatgttgtccggcggcagcaagcggacagccgatggatctgagttcgagagccccaagaagaaacggaaggtgtaatagtgagcggccgcttaattaagctgccttctgcggggcttgccttctggccaagcccttcttctctcccttgcacctgtacctcttggtctttgaataaagcctgagtaggaag

SEQ ID NO: 646 - protein, 1843 aa, synthetic construct
MTSEKGPSTGDPTLRRRIESWEFDVFYDPRELRKETCLLYEIKWGMSRKIWRSSGKNTTNHVEVNFIKKFTSERRFHSSISCSITWFLSWSPCWECSQAIREFLSQHPGVTLVIYVARLFWHMDQRNRQGLRDLVNSGVTIQIMRASEYYHCWRNFVNYPPGDEAHWPQYPPLWMMLYALELHCIILSLPPCLKISRRWQNHLAFFRLHLQNCHYQTIPPHILLATGLIHPSVTWRSGGSSGGSSGSETPGTSESATPESSGGSSGGSDKKYSIGLAIGTNSVGWAVITDEYKVPSKKFKVLGNTDRHSIKKNLIGALLFDSGETAEATRLKRTARRRYTRRKNRICYLQEIFSNEMAKVDDSFFHRLEESFLVEEDKKHERHPIFGNIVDEVAYHEKYPTIYHLRKKLVDSTDKADLRLIYLALAHMIKFRGHFLIEGDLNPDNSDVDKLFIQLVQTYNQLFEENPINASGVDAKAILSARLSKSRRLENLIAQLPGEKKNGLFGNLIALSLGLTPNFKSNFDLAEDAKLQLSKDTYDDDLDNLLAQIGDQYADLFLAAKNLSDAILLSDILRVNTEITKAPLSASMIKRYDEHHQDLTLLKALVRQQLPEKYKEIFFDQSKNGYAGYIDGGASQEEFYKFIKPILEKMDGTEELLVKLNREDLLRKQRTFDNGSIPHQIHLGELHAILRRQEDFYPFLKDNREKIEKILTFRIPYYVGPLARGNSRFAWMTRKSEETITPWNFEEVVDKGASAQSFIERMTNFDKNLPNEKVLPKHSLLYEYFTVYNELTKVKYVTEGMRKPAFLSGEQKKAIVDLLFKTNRKVTVKQLKEDYFKKIECFDSVEISGVEDRFNASLGTYHDLLKIIKDKDFLDNEENEDILEDIVLTLTLFEDREMIEERLKTYAHLFDDKVMKQLKRRRYTGWGRLSRKLINGIRDKQSGKTILDFLKSDGFANRNFMQLIHDDSLTFKEDIQKAQVSGQGDSLHEHIANLAGSPAIKKGILQTVKVVDELVKVMGRHKPENIVIEMARENQTTQKGQKNSRERMKRIEEGIKELGSQILKEHPVENTQLQNEKLYLYYLQNGRDMYVDQELDINRLSDYDVDHIVPQSFLKDDSIDNKVLTRSDKNRGKSDNVPSEEVVKKMKNYWRQLLNAKLITQRKFDNLTKAERGGLSELDKAGFIKRQLVETRQITKHVAQILDSRMNTKYDENDKLIREVKVITLKSKLVSDFRKDFQFYKVREINNYHHAHDAYLNAVVGTALIKKYPKLESEFVYGDYKVYDVRKMIAKSEQEIGKATAKYFFYSNIMNFFKTEITLANGEIRKRPLIETNGETGEIVWDKGRDFATVRKVLSMPQVNIVKKTEVQTGGFSKESILPKRNSDKLIARKKDWDPKKYGGFVSPTVAYSVLVVAKVEKGKSKKLKSVKELLGITIMERSSFEKNPIDFLEAKGYKEVKKDLIIKLPKYSLFELENGRKRMLASARELQKGNELALPSKYVNFLYLASHYEKLKGSPEDNEQKQLFVEQHKHYLDEIIEQISEFSKRVILADANLDKVLSAYNKHRDKPIREQAENIIHLFTLTNLGAPAAFKYFDTTIDRKQYRSTKEVLDATLIHQSITGLYETRIDLSQLGGDSGGSGGSGGSTNLSDIIEKETGKQLVIQESILMLPEEVEEVIGNKPESDILVHTAYDESTDENVMLLTSDAPEYKPWALVIQDSNGENKIKMLSGGSGGSGGSTNLSDIIEKETGKQLVIQESILMLPEEVEEVIGNKPESDILVHTAYDESTDENVMLLTSDAPEYKPWALVIQDSNGENKIKMLSGGSKRTADGSEFESPKKKRKV

SEQ ID NO: 647 - DNA, 7535 bp, synthetic construct
  source 1..7535: mol_type = other DNA
atcaaatgaaactgcaatttattcatatcaggattatcaataccatatttttgaaaaagccgtttctgtaatgaaggagaaaactcaccgaggcagttccataggatggcaagatcctggtatcggtctgcgattccgactcgtccaacatcaatacaacctattaatttcccctcgtcaaaaataaggttatcaagtgagaaatcaccatgagtgacgactgaatccggtgagaatggcaaaagtttatgcatttctttccagacttgttcaacaggccagccattacgctcgtcatcaaaatcactcgcatcaaccaaaccgttattcattcgtgattgcgcctgagcgagacgaaatacgcgatcgctgttaaaaggacaattacaaacaggaatcgaatgcaaccggcgcaggaacactgccagcgcatcaacaatattttcacctgaatcaggatattcttctaatacctggaatgctgttttcccagggatcgcagtggtgagtaaccatgcatcatcaggagtacggataaaatgcttgatggtcggaagaggcataaattccgtcagccagtttagtctgaccatctcatctgtaacatcattggcaacgctacctttgccatgtttcagaaacaactctggcgcatcgggcttcccatacaatcgatagattgtcgcacctgattgcccgacattatcgcgagcccatttatacccatataaatcagcatccatgttggaatttaatcgcggcctagagcaagacgtttcccgttgaatatggctcatactcttcctttttcaatattattgaagcatttatcagggttattgtctcatgagcggatacatatttgaatgtatttagaaaaataaacaaataggggttccgcgcacatttccccgaaaagtgccacctgacgtctaagaaaccattattatcatgacattaacctataaaaataggcgtatcacgaggccctttcgtctcgcgcgtttcggtgatgacggtgaaaacctctgacacatgcagctcccggagacggtcacagcttgtctgtaagcggatgccgggagcagacaagcccgtcagggcgcgtcagcgggtgttggcgggtgtcggggctggcttaactatgcggcatcagagcagattgtactgagagtgcaccatatgcggtgtgaaataccgcacagatgcgtaaggagaaaataccgcatcaggcgccattcgccattcaggctgcgcaactgttgggaagggcgatcggtgcgggcctcttcgctattacgccagctggcgaaagggggatgtgctgcaaggcgattaagttgggtaacgccagggttttcccagtcacgacgttgtaaaacgacggccagtgaattgacgcgtattgggatcgagctcggtacctaatacgacacactataaggaaataagagagaaaagaagagtaagaagaaatataagagccaccatgacctctgagaagggccctagcacaggcgaccccaccctgcggcggagaatcgagagctgggagttcgacgtgttctacgaccctagagaactgagaaaggaaacctgcctgctgtacgagatcaagtggggcatgagcagaaagatctggcggagctctggcaagaacaccaccaaccacgtggaagtgaatttcatcaagaagttcaccagcgagagaaggttccacagcagcatcagctgcagcatcacctggttcctgagctggtccccttgctgggaatgcagccaggccatcagagagttcctgagccaacaccccggagtgacactggtgatctacgtggccagactgttctggcacatggaccagagaaacagacagggcctgagagatctggtcaacagcggcgtgactatccagatcatgcgggccagcgagtactaccactgttggcggaacttcgtgaactacccccccggcgatgaggcccactggcctcagtaccctcctctgtggatgatgctgtacgccctggaactgcactgcatcatcctgtctctgcctccatgtctgaagatctctagaagatggcagaaccacctggccttcttcagactgcacctgcagaattgccactaccagaccatccccccccacatcctgctggctacaggcctgatccacccttctgtgacctggagaagcggaggatctagcggcggctctagcggatctgagacacctggcacaagcgagtctgccacacctgagagtagcggcggatcttctggcggctccggcaagagaaattacatcctcggactggccatcggcatcacctctgtcggctacggcatcatcgactacgagacacgggacgtgatcgatgccggcgtgcggctgtttaaagaggccaacgtcgagaacaacgagggccgcagatctaagagaggcgccagacggctgaagagaagaagaaggcaccggatccagagagtgaagaagctgctgttcgactacaacctgctgaccgaccacagcgagctgagcggcatcaatccttacgaggccagagtgaagggcctgagccagaagctgagcgaggaagagtttagcgctgccctgctgcacctggccaagagaagaggcgtgcacaacgtgaacgaggtggaagaggacaccggcaacgagctgtccaccaaagagcagatcagccggaacagcaaggccctggaagagaaatacgtggccgaactgcagctggaacggctgaaaaaggatggcgaagtgcggggcagcatcaaccggttcaagaccagcgactacgtgaaagaagccaaacagctgctgaaggtgcagaaggcctaccaccagctggaccagagcttcatcgacacctacatcgacctgctggaaacccggcggacctactatgaaggacctggcgagggaagccccttcggctggaaggacatcaaagaatggtacgagatgctgatgggccactgcacctactttcccgaggaactgcggagcgtgaagtacgcctacaacgccgacctgtacaacgccctgaacgacctgaacaacctcgtgatcacccgggacgagaacgagaagctggaatattacgagaagttccaaatcatcgagaacgtgttcaagcagaagaaaaagcccacgctgaagcagatcgccaaagagatcctggtcaacgaggaagatatcaagggctacagagtgaccagcaccggcaagcccgagttcaccaacctgaaggtgtaccacgacatcaaggatatcacagcccggaaagaaatcattgagaatgccgagctgctcgaccagattgccaagatcctgaccatctaccagagcagcgaggacatccaagaggaactgaccaatctgaactccgagctgacccaagaagagatcgaacagatcagcaatctgaaggggtacaccggcacacacaacctgagcctgaaggccatcaacctgatcctggacgagctgtggcacaccaacgacaaccagatcgctatcttcaaccggctgaagctggtgcccaagaaggtggacctgtctcagcagaaagagattcccaccacactggtggacgacttcattctgagccccgtggtcaagagaagcttcatccagagcatcaaagtgatcaacgccatcatcaagaagtacgggctgcccaacgatatcatcatcgagctggcccgcgagaagaactccaaggacgcccagaaaatgatcaacgagatgcagaagcggaaccggcagaccaacgagcggatcgaggaaatcatccggaccaccggcaaagagaacgccaagtacctgatcgagaagatcaagctgcacgacatgcaagagggcaagtgcctgtacagcctggaagccattcctctggaagatctgctgaacaatcccttcaactatgaggtggaccacatcatccccagaagcgtgtccttcgacaacagcttcaacaacaaggtgctcgtgaagcaagaggaaaacagcaagaagggcaacagaaccccattccagtacctgagcagctccgacagcaagatcagctacgaaaccttcaagaagcacatcctgaatctggccaaaggcaagggcagaatcagcaagaccaagaaagagtatctgctcgaggaacgggacatcaacagattcagcgtgcagaaagacttcatcaatcggaacctggtggacaccagatacgccaccagaggcctgatgaatctgctgcggagctacttcagagtgaacaatctggacgtgaaagtcaagtccatcaacggcggcttcaccagctttctgcggcggaagtggaagtttaagaaagagcggaacaagggctataagcaccatgccgaggacgccctgatcattgccaacgccgatttcatcttcaaagagtggaagaaactggacaaggccaaaaaagtgatggaaaaccagatgttcgaggaaaagcaggccgagagcatgcccgagatcgagactgagcaagagtacaaagagattttcatcacgccccaccagatcaagcacattaaggacttcaaggactacaagtacagccaccgcgtggacaagaagcccaatagagagctgattaacgacaccctgtactctacccggaaggacgacaagggcaataccctgatcgtcaacaacctgaacggcctgtacgacaaggacaacgacaagctcaagaagctgatcaacaagagccccgagaaactgctgatgtaccatcacgaccctcagacctaccagaaactgaagctgattatggaacagtacggcgacgagaaaaacccgctgtacaagtactacgaggaaaccggaaactacctgaccaagtactccaaaaaggacaatgggcccgtgatcaagaagattaagtattacggcaacaagctgaatgcccacctggacatcaccgacgactaccccaacagcagaaacaaggtggtcaagctgtccctgaagccttacagattcgacgtgtacctggacaacggcgtgtacaagttcgtgaccgtgaagaacctggacgtcatcaaaaaagaaaactactacgaagtcaacagcaagtgctatgaggaagccaagaaactcaagaaaatcagcaaccaggccgagtttatcgcctccttctacaacaacgatctgatcaagatcaacggggagctgtatcgcgtgatcggcgtcaacaatgacctgctgaaccggatcgaagtgaacatgatcgacatcacctaccgcgagtacctcgagaacatgaacgataagcggcctccacggatcattaagacaatcgccagcaagacgcagagcattaagaagtacagcacagacatcctggggaacctgtacgaagtgaagtccaaaaagcacccgcagattatcaagaaaggcggcagccccaagaaaaaaagaaaggtttcctccgactacaaggaccacgatggcgattataaggatcacgacatcgattacaaggacgatgacgacaagagcggcggcagcggtggatctggcggaagcacaaatctgagcgacatcatcgaaaaagagacaggcaagcagctcgtgatccaagagtccatcctgatgctccctgaagaggtcgaggaagtgatcggcaacaaacccgagagcgatatcctggtgcacaccgcctacgacgagagcaccgacgagaatgtcatgctgctgacaagcgacgcccctgagtacaagccttgggctctcgtgattcaggacagcaatggcgagaacaagatcaagatgctgtccggaggaagcggaggtagcggagggtctaccaacctgtccgacattattgagaaagaaaccgggaagcagctggtcattcaagaaagtatcctcatgttgcccgaagaggttgaagaagtcattgggaacaagcctgagtccgacatcctcgtgcatacagcctatgatgagtccaccgatgagaacgtgatgctcctcacctctgatgccccagagtataagccctgggcacttgtcatccaggactctaacggggaaaacaaaatcaaaatgctctccggcggcagcaagcggacagccgatggatctgagttcgagagccccaagaagaaacggaaggtgtaatagtgagcggccgcttaattaagctgccttctgcggggcttgccttctggccaagcccttcttctctcccttgcacctgtacctcttggtctttgaataaagcctgagtaggaagtctagagtttaaacatttaaatctgcagatcccaatggcgcgccgagcttggctcgagcatggtcatagctgtttcctgtgtgaaattgttatccgctcacaattccacacaacatacgagccggaagcataaagtgtaaagcctggggtgcctaatgagtgagctaactcacattaattgcgttgcgctcactgcccgctttccagtcgggaaacctgtcgtgccagctgcattaatgaatcggccaacgcgcggggagaggcggtttgcgtattgggcactcttgcgcttcctcgctcactgactcgctgcgctcggtcgttcggctgcggcgagcggtatcagctcactcaaaggcggtaatacggttatccacagaatcaggggataacgcaggaaagaacatgtgagcaaaaggccagcaaaaggccaggaaccgtaaaaaggccgcgttgctggcgtttttccataggctccgcccccctgacgagcatcacaaaaatcgacgctcaagtcagaggtggcgaaacccgacaggactataaagataccaggcgtttccccctggaagctccctcgtgcgctctcctgttccgaccctgccgcttaccggatacctgtccgcctttctcccttcgggaagcgtggcgctttctcatagctcacgctgtaggtatctcagttcggtgtaggtcgttcgctccaagctgggctgtgtgcacgaaccccccgttcagcccgaccgctgcgccttatccggtaactatcgtcttgagtccaacccggtaagacacgacttatcgccactggcagcagccactggtaacaggattagcagagcgaggtatgtaggcggtgctacagagttcttgaagtggtggcctaactacggctacactagaagaacagtatttggtatctgcgctctgctgaagccagttaccttcggaaaaagagttggtagctcttgatccggcaaacaaaccaccgctggtagcggtggtttttttgtttgcaagcagcagattacgcgcagaaaaaaaggatctcaagaagatcctttgatcttttctacggggtctgacgctcagtggaacgaaaactcacgttaagggattttggtcatgagattatcaaaaaggatcttcacctagatccttttaaattaaaaatgaagttttaaatcaatctaaagtatatatgagtaaacttggtctgacagttagaaaaactcatcgagc

SEQ ID NO: 648 - protein, 1562 aa, synthetic construct
MTSEKGPSTGDPTLRRRIESWEFDVFYDPRELRKETCLLYEIKWGMSRKIWRSSGKNTTNHVEVNFIKKFTSERRFHSSISCSITWFLSWSPCWECSQAIREFLSQHPGVTLVIYVARLFWHMDQRNRQGLRDLVNSGVTIQIMRASEYYHCWRNFVNYPPGDEAHWPQYPPLWMMLYALELHCIILSLPPCLKISRRWQNHLAFFRLHLQNCHYQTIPPHILLATGLIHPSVTWRSGGSSGGSSGSETPGTSESATPESSGGSSGGSGKRNYILGLAIGITSVGYGIIDYETRDVIDAGVRLFKEANVENNEGRRSKRGARRLKRRRRHRIQRVKKLLFDYNLLTDHSELSGINPYEARVKGLSQKLSEEEFSAALLHLAKRRGVHNVNEVEEDTGNELSTKEQISRNSKALEEKYVAELQLERLKKDGEVRGSINRFKTSDYVKEAKQLLKVQKAYHQLDQSFIDTYIDLLETRRTYYEGPGEGSPFGWKDIKEWYEMLMGHCTYFPEELRSVKYAYNADLYNALNDLNNLVITRDENEKLEYYEKFQIIENVFKQKKKPTLKQIAKEILVNEEDIKGYRVTSTGKPEFTNLKVYHDIKDITARKEIIENAELLDQIAKILTIYQSSEDIQEELTNLNSELTQEEIEQISNLKGYTGTHNLSLKAINLILDELWHTNDNQIAIFNRLKLVPKKVDLSQQKEIPTTLVDDFILSPVVKRSFIQSIKVINAIIKKYGLPNDIIIELAREKNSKDAQKMINEMQKRNRQTNERIEEIIRTTGKENAKYLIEKIKLHDMQEGKCLYSLEAIPLEDLLNNPFNYEVDHIIPRSVSFDNSFNNKVLVKQEENSKKGNRTPFQYLSSSDSKISYETFKKHILNLAKGKGRISKTKKEYLLEERDINRFSVQKDFINRNLVDTRYATRGLMNLLRSYFRVNNLDVKVKSINGGFTSFLRRKWKFKKERNKGYKHHAEDALIIANADFIFKEWKKLDKAKKVMENQMFEEKQAESMPEIETEQEYKEIFITPHQIKHIKDFKDYKYSHRVDKKPNRELINDTLYSTRKDDKGNTLIVNNLNGLYDKDNDKLKKLINKSPEKLLMYHHDPQTYQKLKLIMEQYGDEKNPLYKYYEETGNYLTKYSKKDNGPVIKKIKYYGNKLNAHLDITDDYPNSRNKVVKLSLKPYRFDVYLDNGVYKFVTVKNLDVIKKENYYEVNSKCYEEAKKLKKISNQAEFIASFYNNDLIKINGELYRVIGVNNDLLNRIEVNMIDITYREYLENMNDKRPPRIIKTIASKTQSIKKYSTDILGNLYEVKSKKHPQIIKKGGSPKKKRKVSSDYKDHDGDYKDHDIDYKDDDDKSGGSGGSGGSTNLSDIIEKETGKQLVIQESILMLPEEVEEVIGNKPESDILVHTAYDESTDENVMLLTSDAPEYKPWALVIQDSNGENKIKMLSGGSGGSGGSTNLSDIIEKETGKQLVIQESILMLPEEVEEVIGNKPESDILVHTAYDESTDENVMLLTSDAPEYKPWALVIQDSNGENKIKMLSGGSKRTADGSEFESPKKKRKV

SEQ ID NO: 649 - DNA, 7613 bp, synthetic construct
  source 1..7613: mol_type = other DNA
atcaaatgaaactgcaatttattcatatcaggattatcaataccatatttttgaaaaagccgtttctgtaatgaaggagaaaactcaccgaggcagttccataggatggcaagatcctggtatcggtctgcgattccgactcgtccaacatcaatacaacctattaatttcccctcgtcaaaaataaggttatcaagtgagaaatcaccatgagtgacgactgaatccggtgagaatggcaaaagtttatgcatttctttccagacttgttcaacaggccagccattacgctcgtcatcaaaatcactcgcatcaaccaaaccgttattcattcgtgattgcgcctgagcgagacgaaatacgcgatcgctgttaaaaggacaattacaaacaggaatcgaatgcaaccggcgcaggaacactgccagcgcatcaacaatattttcacctgaatcaggatattcttctaatacctggaatgctgttttcccagggatcgcagtggtgagtaaccatgcatcatcaggagtacggataaaatgcttgatggtcggaagaggcataaattccgtcagccagtttagtctgaccatctcatctgtaacatcattggcaacgctacctttgccatgtttcagaaacaactctggcgcatcgggcttcccatacaatcgatagattgtcgcacctgattgcccgacattatcgcgagcccatttatacccatataaatcagcatccatgttggaatttaatcgcggcctagagcaagacgtttcccgttgaatatggctcatactcttcctttttcaatattattgaagcatttatcagggttattgtctcatgagcggatacatatttgaatgtatttagaaaaataaacaaataggggttccgcgcacatttccccgaaaagtgccacctgacgtctaagaaaccattattatcatgacattaacctataaaaataggcgtatcacgaggccctttcgtctcgcgcgtttcggtgatgacggtgaaaacctctgacacatgcagctcccggagacggtcacagcttgtctgtaagcggatgccgggagcagacaagcccgtcagggcgcgtcagcgggtgttggcgggtgtcggggctggcttaactatgcggcatcagagcagattgtactgagagtgcaccatatgcggtgtgaaataccgcacagatgcgtaaggagaaaataccgcatcaggcgccattcgccattcaggctgcgcaactgttgggaagggcgatcggtgcgggcctcttcgctattacgccagctggcgaaagggggatgtgctgcaaggcgattaagttgggtaacgccagggttttcccagtcacgacgttgtaaaacgacggccagtgaattgacgcgtattgggatcgagctcggtacctaatacgacacactataaggaaataagagagaaaagaagagtaagaagaaatataagagccaccatgagcgaggtcgagttctctcacgaatattggatgagacacgctctcaccctggctaagagagccagggacgaaagagaggtgccagttggcgctgtcctggtgttgaacaatcgcgtcatcggagaaggatggaatcgcgccattggcctgcacgatccaaccgcacatgccgaaattatggctctgcggcaaggcggcctcgtgatgcaaaattacagactgtacgatgctaccctctactccaccttcgagccctgtgtcatgtgtgctggggcaatgattcactcccggattggccgcgtggtgtttggagtgcggaatgccaagactggcgccgctggatctctgatggacgtcctgcaccatcctgggatgaaccaccgggtcgagatcacagagggaattctggctgacgagtgcgctgccctgctgtgcaggttctttagaatgcctagaagggtgttcaacgcccagaaaaaagctcagagcagcaccgattccggcggaagcagcggaggatcttctggaagcgaaaccccaggcaccagcgagtctgccacaccagaatcatctggcggtagctccggcggcagcgacaagaagtattctatcggactggccatcggcaccaactctgttggatgggccgtgatcaccgacgagtacaaggtgcccagcaagaaattcaaggtgctgggcaacaccgacaggcacagcatcaagaagaacctgatcggcgcactgctgttcgactctggcgaaacagccgaggccaccagactgaagagaacagcccgcagacggtacaccagaagaaagaaccggatctgctacctccaagagatcttcagcaacgagatggccaaggtggacgacagcttcttccacagactggaagagtccttcctggtggaagaggacaagaagcacgagagacaccccatcttcggcaacatcgtggacgaggtggcctaccacgagaagtaccccaccatctaccacctgagaaagaaactggtggacagcaccgacaaggccgacctgagactgatctatctggccctggctcacatgatcaagttccggggccacttcctgatcgagggcgacctgaatcctgacaacagcgacgtggacaagctgttcatccagctggtgcagacctacaaccagctgttcgaggaaaaccccatcaacgccagcggagtggatgccaaggccatcctgtctgccagactgagcaagagcagacggctggaaaatctgatcgcccagctgcctggcgagaagaagaatggcctgttcggcaacctgattgccctgagcctgggcctgacacctaacttcaagagcaacttcgacctggccgaggacgccaaactgcagctgagcaaggacacctacgacgacgacctggacaatctgctggcccagatcggcgatcagtacgccgacttgtttctggccgccaagaatctgagcgacgccatcctgctgtccgacatcctgagagtgaacaccgagatcaccaaggcacctctgagcgcctctatgatcaagagatacgacgagcaccaccaggatctgaccctgctgaaggccctcgttagacagcagctgccagagaagtacaaagagattttcttcgaccagagcaagaacggctacgccggctacattgatggcggagccagccaagaggaattctacaagttcatcaagcccatcctcgagaagatggacggcaccgaggaactgctggtcaagctgaacagagaggacctgctgagaaagcagagaaccttcgacaacggcagcatccctcaccagatccacctgggagaactgcacgccattctgcggagacaagaggacttttacccattcctgaaggacaaccgggaaaagatcgagaaaatcctgaccttcaggatcccctactacgtgggaccactggccagaggcaatagcagattcgcctggatgaccagaaagagcgaggaaaccatcactccctggaacttcgaggaagtggtggacaagggcgccagcgctcagtccttcatcgagcggatgaccaacttcgataagaacctgcctaacgagaaggtgctgcccaagcacagcctgctgtacgagtacttcaccgtgtacaacgagctgaccaaagtgaaatacgtgaccgagggaatgagaaagcccgcctttctgagcggcgagcagaaaaaggccatcgtggatctgctgttcaagaccaaccggaaagtgaccgtgaagcagctgaaagaggactacttcaagaaaatcgagtgcttcgacagcgtcgagatctccggcgtggaagatcggttcaatgccagcctgggcacataccacgatctgctgaaaattatcaaggacaaggacttcctggacaacgaagagaacgaggacatccttgaggacatcgtgctgacactgaccctgtttgaggacagagagatgatcgaggaacggctgaaaacatacgcccacctgttcgacgacaaagtgatgaagcaactgaagcggcggagatacaccggctggggcagactgtctcggaagctgatcaacggcatccgggataagcagtccggcaagaccatcctggactttctgaagtccgacggcttcgccaacagaaacttcatgcagctgattcacgacgacagcctcaccttcaaagaggatatccagaaagcccaggtgtccggccagggcgattctctgcatgagcacattgccaacctggccggctctcccgccattaagaaaggcatcctgcagacagtgaaggtggtggacgagcttgtgaaagtgatgggcagacacaagcccgagaacatcgtgatcgaaatggccagagagaaccagaccacacagaagggacagaagaacagccgcgagagaatgaagcggatcgaagagggcatcaaagagctgggcagccagatcctgaaagaacaccccgtggaaaacacccagctgcagaacgagaagctgtacctgtactacctgcagaatggacgggatatgtacgtggaccaagagctggacatcaacagactgtccgactacgatgtggaccatatcgtgccccagtcttttctgaaggacgactccatcgacaacaaggtcctgaccagatccgacaagaatcggggcaagagcgacaacgtgccctccgaagaggtggtcaagaagatgaagaactactggcgacagctgctgaacgccaagctgattacccagcggaagttcgacaatctgaccaaggccgaaagaggcggcctgagcgaactggataaggccggcttcatcaagagacagctggtggaaacccggcagatcacaaagcacgtggcacagattctggactctcggatgaacactaagtacgacgagaacgacaaactgatccgcgaagtgaaagtcatcaccctgaagtccaagctggtgtccgatttccggaaggatttccagttctacaaagtgcgcgagatcaacaactaccatcacgcccacgacgcctacctgaatgccgttgttggaacagccctgatcaaaaagtaccctaagctggaaagcgagttcgtgtacggcgactacaaggtgtacgacgtgcggaagatgatcgccaagagcgagcaagagattggcaaggcaaccgccaagtacttcttctacagcaacatcatgaactttttcaagacagagatcaccctcgccaacggcgagatcagaaagcggcctctgatcgagacaaacggcgaaaccggcgagattgtgtgggataagggcagagactttgccacagtgcggaaagtgctgagcatgccccaagtgaatatcgtgaagaaaaccgaggtgcagacaggcggcttcagcaaagagtctatcctgcctaagcggaactccgacaagctgatcgccagaaagaaggactgggaccccaagaagtacggcggcttcgattctcctaccgtggcctatagcgtgctggtggtggccaaagtggaaaagggcaagtccaagaaactcaagagcgtgaaagagctgctggggatcaccatcatggaaagaagcagcttcgagaagaatccgatcgatttcctcgaggccaagggctacaaagaagtgaaaaaggacctgatcatcaagctccccaagtactccctgttcgagctggaaaacggccggaagagaatgctggcctctgctggcgaactgcagaagggaaacgaactggccctgcctagcaaatatgtgaacttcctgtacctggccagccactatgagaagctgaagggcagccccgaggacaatgagcaaaagcagctgtttgtggaacagcacaagcactacctggacgagatcatcgagcagatcagcgagtttagcaagagagtgattctggccgacgccaatctggacaaagtgctgtccgcctacaacaagcaccgggacaagcctatcagagagcaggccgagaatatcatccacctgtttaccctgaccaacctgggagcccctgccgccttcaagtactttgacaccaccatcgaccggaagcggtacacctccaccaaagaggtgctggacgccactctgatccaccagtctatcaccggcctgtacgagacacggatcgacctgtctcaactcggaggcgacgaaggcgccgataagagaaccgccgatggctctgagttcgagagccccaagaaaaagcgcaaagtgtaatagtgagcggccgcttaattaagctgccttctgcggggcttgccttctggccaagcccttcttctctcccttgcacctgtacctcttggtctttgaataaagcctgagtaggaagtctagagtttaaacatttaaatctgcagatcccaatggcgcgccgagcttggctcgagcatggtcatagctgtttcctgtgtgaaattgttatccgctcacaattccacacaacatacgagccggaagcataaagtgtaaagcctggggtgcctaatgagtgagctaactcacattaattgcgttgcgctcactgcccgctttccagtcgggaaacctgtcgtgccagctgcattaatgaatcggccaacgcgcggggagaggcggtttgcgtattgggcactcttgcgcttcctcgctcactgactcgctgcgctcggtcgttcggctgcggcgagcggtatcagctcactcaaaggcggtaatacggttatccacagaatcaggggataacgcaggaaagaacatgtgagcaaaaggccagcaaaaggccaggaaccgtaaaaaggccgcgttgctggcgtttttccataggctccgcccccctgacgagcatcacaaaaatcgacgctcaagtcagaggtggcgaaacccgacaggactataaagataccaggcgtttccccctggaagctccctcgtgcgctctcctgttccgaccctgccgcttaccggatacctgtccgcctttctcccttcgggaagcgtggcgctttctcatagctcacgctgtaggtatctcagttcggtgtaggtcgttcgctccaagctgggctgtgtgcacgaaccccccgttcagcccgaccgctgcgccttatccggtaactatcgtcttgagtccaacccggtaagacacgacttatcgccactggcagcagccactggtaacaggattagcagagcgaggtatgtaggcggtgctacagagttcttgaagtggtggcctaactacggctacactagaagaacagtatttggtatctgcgctctgctgaagccagttaccttcggaaaaagagttggtagctcttgatccggcaaacaaaccaccgctggtagcggtggtttttttgtttgcaagcagcagattacgcgcagaaaaaaaggatctcaagaagatcctttgatcttttctacggggtctgacgctcagtggaacgaaaactcacgttaagggattttggtcatgagattatcaaaaaggatcttcacctagatccttttaaattaaaaatgaagttttaaatcaatctaaagtatatatgagtaaacttggtctgacagttagaaaaactcatcgagc

SEQ ID NO: 650 - protein, 1588 aa, synthetic construct; identical to SEQ ID NO: 339

SEQ ID NO: 651 - DNA, 6767 bp, synthetic construct
  source 1..6767: mol_type = other DNA
catcaaatgaaactgcaatttattcatatcaggattatcaataccatatttttgaaaaagccgtttctgtaatgaaggagaaaactcaccgaggcagttccataggatggcaagatcctggtatcggtctgcgattccgactcgtccaacatcaatacaacctattaatttcccctcgtcaaaaataaggttatcaagtgagaaatcaccatgagtgacgactgaatccggtgagaatggcaaaagtttatgcatttctttccagacttgttcaacaggccagccattacgctcgtcatcaaaatcactcgcatcaaccaaaccgttattcattcgtgattgcgcctgagcgagacgaaatacgcgatcgctgttaaaaggacaattacaaacaggaatcgaatgcaaccggcgcaggaacactgccagcgcatcaacaatattttcacctgaatcaggatattcttctaatacctggaatgctgttttcccagggatcgcagtggtgagtaaccatgcatcatcaggagtacggataaaatgcttgatggtcggaagaggcataaattccgtcagccagtttagtctgaccatctcatctgtaacatcattggcaacgctacctttgccatgtttcagaaacaactctggcgcatcgggcttcccatacaatcgatagattgtcgcacctgattgcccgacattatcgcgagcccatttatacccatataaatcagcatccatgttggaatttaatcgcggcctagagcaagacgtttcccgttgaatatggctcatactcttcctttttcaatattattgaagcatttatcagggttattgtctcatgagcggatacatatttgaatgtatttagaaaaataaacaaataggggttccgcgcacatttccccgaaaagtgccacctgacgtctaagaaaccattattatcatgacattaacctataaaaataggcgtatcacgaggccctttcgtctcgcgcgtttcggtgatgacggtgaaaacctctgacacatgcagctcccggagacggtcacagcttgtctgtaagcggatgccgggagcagacaagcccgtcagggcgcgtcagcgggtgttggcgggtgtcggggctggcttaactatgcggcatcagagcagattgtactgagagtgcaccatatgcggtgtgaaataccgcacagatgcgtaaggagaaaataccgcatcaggcgccattcgccattcaggctgcgcaactgttgggaagggcgatcggtgcgggcctcttcgctattacgccagctggcgaaagggggatgtgctgcaaggcgattaagttgggtaacgccagggttttcccagtcacgacgttgtaaaacgacggccagtgaattgacgcgtattgggatcgagctcggtacctaatacgacacactataaggaaataagagagaaaagaagagtaagaagaaatataagagccaccatgagcgaggtcgagttctctcacgaatattggatgagacacgctctcaccctggctaagagagccagggacgaaagagaggtgccagttggcgctgtcctggtgttgaacaatcgcgtcatcggagaaggatggaatcgcgccattggcctgcacgatccaaccgcacatgccgaaattatggctctgcggcaaggcggcctcgtgatgcaaaattacagactgtacgatgctaccctctactccaccttcgagccctgtgtcatgtgtgctggggcaatgattcactcccggattggccgcgtggtgtttggagtgcggaatgccaagactggcgccgctggatctctgatggacgtcctgcaccatcctgggatgaaccaccgggtcgagatcacagagggaattctggctgacgagtgcgctgccctgctgtgcaggttctttagaatgcctagaagggtgttcaacgcccagaaaaaagctcagagcagcaccgattccggcggaagcagcggaggatcttctggaagcgaaaccccaggcaccagcgagtctgccacaccagaatcatctggcggtagctccggcggcagcaagagaaattacatcctcggactggccatcggcatcacctctgtcggctacggcatcatcgactacgagacacgggacgtgatcgatgccggcgtgcggctgtttaaagaggccaacgtcgagaacaacgagggccgcagatctaagagaggcgccagacggctgaagagaagaagaaggcaccggatccagagagtgaagaagctgctgttcgactacaacctgctgaccgaccacagcgagctgagcggcatcaatccttacgaggccagagtgaagggcctgagccagaagctgagcgaggaagagtttagcgctgccctgctgcacctggccaagagaagaggcgtgcacaacgtgaacgaggtggaagaggacaccggcaacgagctgtccaccaaagagcagatcagccggaacagcaaggccctggaagagaaatacgtggccgaactgcagctggaacggctgaaaaaggatggcgaagtgcggggcagcatcaaccggttcaagaccagcgactacgtgaaagaagccaaacagctgctgaaggtgcagaaggcctaccaccagctggaccagagcttcatcgacacctacatcgacctgctggaaacccggcggacctactatgaaggacctggcgagggaagccccttcggctggaaggacatcaaagaatggtacgagatgctgatgggccactgcacctactttcccgaggaactgcggagcgtgaagtacgcctacaacgccgacctgtacaacgccctgaacgacctgaacaacctcgtgatcacccgggacgagaacgagaagctggaatattacgagaagttccaaatcatcgagaacgtgttcaagcagaagaaaaagcccacgctgaagcagatcgccaaagagatcctggtcaacgaggaagatatcaagggctacagagtgaccagcaccggcaagcccgagttcaccaacctgaaggtgtaccacgacatcaaggatatcacagcccggaaagaaatcattgagaatgccgagctgctcgaccagattgccaagatcctgaccatctaccagagcagcgaggacatccaagaggaactgaccaatctgaactccgagctgacccaagaagagatcgaacagatcagcaatctgaaggggtacaccggcacacacaacctgagcctgaaggccatcaacctgatcctggacgagctgtggcacaccaacgacaaccagatcgctatcttcaaccggctgaagctggtgcccaagaaggtggacctgtctcagcagaaagagattcccaccacactggtggacgacttcattctgagccccgtggtcaagagaagcttcatccagagcatcaaagtgatcaacgccatcatcaagaagtacgggctgcccaacgatatcatcatcgagctggcccgcgagaagaactccaaggacgcccagaaaatgatcaacgagatgcagaagcggaaccggcagaccaacgagcggatcgaggaaatcatccggaccaccggcaaagagaacgccaagtacctgatcgagaagatcaagctgcacgacatgcaagagggcaagtgcctgtacagcctggaagccattcctctggaagatctgctgaacaatcccttcaactatgaggtggaccacatcatccccagaagcgtgtccttcgacaacagcttcaacaacaaggtgctcgtgaagcaagaggaaaacagcaagaagggcaacagaaccccattccagtacctgagcagctccgacagcaagatcagctacgaaaccttcaagaagcacatcctgaatctggccaaaggcaagggcagaatcagcaagaccaagaaagagtatctgctcgaggaacgggacatcaacagattcagcgtgcagaaagacttcatcaatcggaacctggtggacaccagatacgccaccagaggcctgatgaatctgctgcggagctacttcagagtgaacaatctggacgtgaaagtcaagtccatcaacggcggcttcaccagctttctgcggcggaagtggaagtttaagaaagagcggaacaagggctataagcaccatgccgaggacgccctgatcattgccaacgccgatttcatcttcaaagagtggaagaaactggacaaggccaaaaaagtgatggaaaaccagatgttcgaggaaaagcaggccgagagcatgcccgagatcgagactgagcaagagtacaaagagattttcatcacgccccaccagatcaagcacattaaggacttcaaggactacaagtacagccaccgcgtggacaagaagcccaaccggaagctgatcaatgacacactgtacagcacccggaaggacgacaagggcaataccctgatcgtcaacaacctgaacggcctgtacgacaaggacaacgacaagctcaagaagctgattaacaagagccccgagaagctcctgatgtaccatcacgaccctcagacctaccagaaactgaagctcatcatggaacagtacggcgacgagaaaaacccgctgtacaagtactacgaggaaaccggaaactacctgaccaagtactccaaaaaggacaatgggcccgtgatcaagaagattaagtattacggcaacaagctgaatgcccacctggacatcaccgacgactaccccaacagcagaaacaaggtggtcaagctgtccctgaagccttacagattcgacgtgtacctggacaacggcgtgtacaagttcgtgaccgtgaagaacctggacgtcatcaaaaaagaaaactactacgaagtcaacagcaagtgctatgaggaagccaagaaactcaagaaaatcagcaaccaggccgagtttatcgccagcttctacaagaacgacctcatcaagatcaacggggagctgtatagagtgatcggggtcaacaatgacctgctgaaccggatcgaagtgaacatgatcgacatcacctaccgcgagtacctcgagaacatgaacgataagcggccaccgcacatcattaagacaatcgccagcaagacgcagagcattaagaagtacagcacagacatcctggggaacctgtacgaagtgaagtccaaaaagcacccgcagattatcaagaaaggcggcagccccaagaaaaaaagaaaggtttcctccgactacaaggaccacgatggcgattataaggatcacgacatcgattacaaggacgatgacgacaaggaaggcgccgataagagaaccgccgatggctctgagttcgagagccccaagaaaaagcgcaaagtgtaatagtgagcggccgcttaattaagctgccttctgcggggcttgccttctggccaagcccttcttctctcccttgcacctgtacctcttggtctttgaataaagcctgagtaggaagtctagagtttaaacatttaaatctgcagatcccaatggcgcgccgagcttggctcgagcatggtcatagctgtttcctgtgtgaaattgttatccgctcacaattccacacaacatacgagccggaagcataaagtgtaaagcctggggtgcctaatgagtgagctaactcacattaattgcgttgcgctcactgcccgctttccagtcgggaaacctgtcgtgccagctgcattaatgaatcggccaacgcgcggggagaggcggtttgcgtattgggcactcttgcgcttcctcgctcactgactcgctgcgctcggtcgttcggctgcggcgagcggtatcagctcactcaaaggcggtaatacggttatccacagaatcaggggataacgcaggaaagaacatgtgagcaaaaggccagcaaaaggccaggaaccgtaaaaaggccgcgttgctggcgtttttccataggctccgcccccctgacgagcatcacaaaaatcgacgctcaagtcagaggtggcgaaacccgacaggactataaagataccaggcgtttccccctggaagctccctcgtgcgctctcctgttccgaccctgccgcttaccggatacctgtccgcctttctcccttcgggaagcgtggcgctttctcatagctcacgctgtaggtatctcagttcggtgtaggtcgttcgctccaagctgggctgtgtgcacgaaccccccgttcagcccgaccgctgcgccttatccggtaactatcgtcttgagtccaacccggtaagacacgacttatcgccactggcagcagccactggtaacaggattagcagagcgaggtatgtaggcggtgctacagagttcttgaagtggtggcctaactacggctacactagaagaacagtatttggtatctgcgctctgctgaagccagttaccttcggaaaaagagttggtagctcttgatccggcaaacaaaccaccgctggtagcggtggtttttttgtttgcaagcagcagattacgcgcagaaaaaaaggatctcaagaagatcctttgatcttttctacggggtctgacgctcagtggaacgaaaactcacgttaagggattttggtcatgagattatcaaaaaggatcttcacctagatccttttaaattaaaaatgaagttttaaatcaatctaaagtatatatgagtaaacttggtctgacagttagaaaaactcatcgag

SEQ ID NO: 652 - protein, 1306 aa, synthetic construct
MSEVEFSHEYWMRHALTLAKRARDEREVPVGAVLVLNNRVIGEGWNRAIGLHDPTAHAEIMALRQGGLVMQNYRLYDATLYSTFEPCVMCAGAMIHSRIGRVVFGVRNAKTGAAGSLMDVLHHPGMNHRVEITEGILADECAALLCRFFRMPRRVFNAQKKAQSSTDSGGSSGGSSGSETPGTSESATPESSGGSSGGSKRNYILGLAIGITSVGYGIIDYETRDVIDAGVRLFKEANVENNEGRRSKRGARRLKRRRRHRIQRVKKLLFDYNLLTDHSELSGINPYEARVKGLSQKLSEEEFSAALLHLAKRRGVHNVNEVEEDTGNELSTKEQISRNSKALEEKYVAELQLERLKKDGEVRGSINRFKTSDYVKEAKQLLKVQKAYHQLDQSFIDTYIDLLETRRTYYEGPGEGSPFGWKDIKEWYEMLMGHCTYFPEELRSVKYAYNADLYNALNDLNNLVITRDENEKLEYYEKFQIIENVFKQKKKPTLKQIAKEILVNEEDIKGYRVTSTGKPEFTNLKVYHDIKDITARKEIIENAELLDQIAKILTIYQSSEDIQEELTNLNSELTQEEIEQISNLKGYTGTHNLSLKAINLILDELWHTNDNQIAIFNRLKLVPKKVDLSQQKEIPTTLVDDFILSPVVKRSFIQSIKVINAIIKKYGLPNDIIIELAREKNSKDAQKMINEMQKRNRQTNERIEEIIRTTGKENAKYLIEKIKLHDMQEGKCLYSLEAIPLEDLLNNPFNYEVDHIIPRSVSFDNSFNNKVLVKQEENSKKGNRTPFQYLSSSDSKISYETFKKHILNLAKGKGRISKTKKEYLLEERDINRFSVQKDFINRNLVDTRYATRGLMNLLRSYFRVNNLDVKVKSINGGFTSFLRRKWKFKKERNKGYKHHAEDALIIANADFIFKEWKKLDKAKKVMENQMFEEKQAESMPEIETEQEYKEIFITPHQIKHIKDFKDYKYSHRVDKKPNRKLINDTLYSTRKDDKGNTLIVNNLNGLYDKDNDKLKKLINKSPEKLLMYHHDPQTYQKLKLIMEQYGDEKNPLYKYYEETGNYLTKYSKKDNGPVIKKIKYYGNKLNAHLDITDDYPNSRNKVVKLSLKPYRFDVYLDNGVYKFVTVKNLDVIKKENYYEVNSKCYEEAKKLKKISNQAEFIASFYKNDLIKINGELYRVIGVNNDLLNRIEVNMIDITYREYLENMNDKRPPHIIKTIASKTQSIKKYSTDILGNLYEVKSKKHPQIIKKGGSPKKKRKVSSDYKDHDGDYKDHDIDYKDDDDKEGADKRTADGSEFESPKKKRKV

SEQ ID NO: 653 - DNA, 7613 bp, synthetic construct
  source 1..7613: mol_type = other DNA
tctagagtttaaacatttaaatctgcagatcccaatggcgcgccgagcttggctcgagcatggtcatagctgtttcctgtgtgaaattgttatccgctcacaattccacacaacatacgagccggaagcataaagtgtaaagcctggggtgcctaatgagtgagctaactcacattaattgcgttgcgctcactgcccgctttccagtcgggaaacctgtcgtgccagctgcattaatgaatcggccaacgcgcggggagaggcggtttgcgtattgggcactcttgcgcttcctcgctcactgactcgctgcgctcggtcgttcggctgcggcgagcggtatcagctcactcaaaggcggtaatacggttatccacagaatcaggggataacgcaggaaagaacatgtgagcaaaaggccagcaaaaggccaggaaccgtaaaaaggccgcgttgctggcgtttttccataggctccgcccccctgacgagcatcacaaaaatcgacgctcaagtcagaggtggcgaaacccgacaggactataaagataccaggcgtttccccctggaagctccctcgtgcgctctcctgttccgaccctgccgcttaccggatacctgtccgcctttctcccttcgggaagcgtggcgctttctcatagctcacgctgtaggtatctcagttcggtgtaggtcgttcgctccaagctgggctgtgtgcacgaaccccccgttcagcccgaccgctgcgccttatccggtaactatcgtcttgagtccaacccggtaagacacgacttatcgccactggcagcagccactggtaacaggattagcagagcgaggtatgtaggcggtgctacagagttcttgaagtggtggcctaactacggctacactagaagaacagtatttggtatctgcgctctgctgaagccagttaccttcggaaaaagagttggtagctcttgatccggcaaacaaaccaccgctggtagcggtggtttttttgtttgcaagcagcagattacgcgcagaaaaaaaggatctcaagaagatcctttgatcttttctacggggtctgacgctcagtggaacgaaaactcacgttaagggattttggtcatgagattatcaaaaaggatcttcacctagatccttttaaattaaaaatgaagttttaaatcaatctaaagtatatatgagtaaacttggtctgacagttagaaaaactcatcgagcatcaaatgaaactgcaatttattcatatcaggattatcaataccatatttttgaaaaagccgtttctgtaatgaaggagaaaactcaccgaggcagttccataggatggcaagatcctggtatcggtctgcgattccgactcgtccaacatcaatacaacctattaatttcccctcgtcaaaaataaggttatcaagtgagaaatcaccatgagtgacgactgaatccggtgagaatggcaaaagtttatgcatttctttccagacttgttcaacaggccagccattacgctcgtcatcaaaatcactcgcatcaaccaaaccgttattcattcgtgattgcgcctgagcgagacgaaatacgcgatcgctgttaaaaggacaattacaaacaggaatcgaatgcaaccggcgcaggaacactgccagcgcatcaacaatattttcacctgaatcaggatattcttctaatacctggaatgctgttttcccagggatcgcagtggtgagtaaccatgcatcatcaggagtacggataaaatgcttgatggtcggaagaggcataaattccgtcagccagtttagtctgaccatctcatctgtaacatcattggcaacgctacctttgccatgtttcagaaacaactctggcgcatcgggcttcccatacaatcgatagattgtcgcacctgattgcccgacattatcgcgagcccatttatacccatataaatcagcatccatgttggaatttaatcgcggcctagagcaagacgtttcccgttgaatatggctcatactcttcctttttcaatattattgaagcatttatcagggttattgtctcatgagcggatacatatttgaatgtatttagaaaaataaacaaataggggttccgcgcacatttccccgaaaagtgccacctgacgtctaagaaaccattattatcatgacattaacctataaaaataggcgtatcacgaggccctttcgtctcgcgcgtttcggtgatgacggtgaaaacctctgacacatgcagctcccggagacggtcacagcttgtctgtaagcggatgccgggagcagacaagcccgtcagggcgcgtcagcgggtgttggcgggtgtcggggctggcttaactatgcggcatcagagcagattgtactgagagtgcaccatatgcggtgtgaaataccgcacagatgcgtaaggagaaaataccgcatcaggcgccattcgccattcaggctgcgcaactgttgggaagggcgatcggtgcgggcctcttcgctattacgccagctggcgaaagggggatgtgctgcaaggcgattaagttgggtaacgccagggttttcccagtcacgacgttgtaaaacgacggccagtgaattgacgcgtattgggatcgagctcggtacctaatacgacacactataaggaaataagagagaaaagaagagtaagaagaaatataagagccaccatgagcgaggtcgagttctctcacgaatattggatgagacacgctctcaccctggctaagagagccagggacgaaagagaggtgccagttggcgctgtcctggtgttgaacaatcgcgtcatcggagaaggatggaatcgcgccattggcctgcacgatccaaccgcacatgcccagattatggctctgcggcaaggcggcctcgtgatgcaaaattacagactgtacgatgctaccctctactccaccttcgagccctgtgtcatgtgtgctggggcaatgattcactcccggattggccgcgtggtgtttggagtgcggaatgccaagactggcgccgctggatctctgatggacgtcctgcaccatcctgggatgaaccaccgggtcgagatcacagagggaattctggctgacgagtgcgctgccctgctgtgcaggttctttagaatgcctagaagggtgttcaacgcccagaaaaaagctcagagcagcaccgattccggcggaagcagcggaggatcttctggaagcgaaaccccaggcaccagcgagtctgccacaccagaatcatctggcggtagctccggcggcagcgacaagaagtattctatcggactggccatcggcaccaactctgttggatgggccgtgatcaccgacgagtacaaggtgcccagcaagaaattcaaggtgctgggcaacaccgacaggcacagcatcaagaagaacctgatcggcgcactgctgttcgactctggcgaaacagccgaggccaccagactgaagagaacagcccgcagacggtacaccagaagaaagaaccggatctgctacctccaagagatcttcagcaacgagatggccaaggtggacgacagcttcttccacagactggaagagtccttcctggtggaagaggacaagaagcacgagagacaccccatcttcggcaacatcgtggacgaggtggcctaccacgagaagtaccccaccatctaccacctgagaaagaaactggtggacagcaccgacaaggccgacctgagactgatctatctggccctggctcacatgatcaagttccggggccacttcctgatcgagggcgacctgaatcctgacaacagcgacgtggacaagctgttcatccagctggtgcagacctacaaccagctgttcgaggaaaaccccatcaacgccagcggagtggatgccaaggccatcctgtctgccagactgagcaagagcagacggctggaaaatctgatcgcccagctgcctggcgagaagaagaatggcctgttcggcaacctgattgccctgagcctgggcctgacacctaacttcaagagcaacttcgacctggccgaggacgccaaactgcagctgagcaaggacacctacgacgacgacctggacaatctgctggcccagatcggcgatcagtacgccgacttgtttctggccgccaagaatctgagcgacgccatcctgctgtccgacatcctgagagtgaacaccgagatcaccaaggcacctctgagcgcctctatgatcaagagatacgacgagcaccaccaggatctgaccctgctgaaggccctcgttagacagcagctgccagagaagtacaaagagattttcttcgaccagagcaagaacggctacgccggctacattgatggcggagccagccaagaggaattctacaagttcatcaagcccatcctcgagaagatggacggcaccgaggaactgctggtcaagctgaacagagaggacctgctgagaaagcagagaaccttcgacaacggcagcatccctcaccagatccacctgggagaactgcacgccattctgcggagacaagaggacttttacccattcctgaaggacaaccgggaaaagatcgagaaaatcctgaccttcaggatcccctactacgtgggaccactggccagaggcaatagcagattcgcctggatgaccagaaagagcgaggaaaccatcactccctggaacttcgaggaagtggtggacaagggcgccagcgctcagtccttcatcgagcggatgaccaacttcgataagaacctgcctaacgagaaggtgctgcccaagcacagcctgctgtacgagtacttcaccgtgtacaacgagctgaccaaagtgaaatacgtgaccgagggaatgagaaagcccgcctttctgagcggcgagcagaaaaaggccatcgtggatctgctgttcaagaccaaccggaaagtgaccgtgaagcagctgaaagaggactacttcaagaaaatcgagtgcttcgacagcgtcgagatctccggcgtggaagatcggttcaatgccagcctgggcacataccacgatctgctgaaaattatcaaggacaaggacttcctggacaacgaagagaacgaggacatccttgaggacatcgtgctgacactgaccctgtttgaggacagagagatgatcgaggaacggctgaaaacatacgcccacctgttcgacgacaaagtgatgaagcaactgaagcggcggagatacaccggctggggcagactgtctcggaagctgatcaacggcatccgggataagcagtccggcaagaccatcctggactttctgaagtccgacggcttcgccaacagaaacttcatgcagctgattcacgacgacagcctcaccttcaaagaggatatccagaaagcccaggtgtccggccagggcgattctctgcatgagcacattgccaacctggccggctctcccgccattaagaaaggcatcctgcagacagtgaaggtggtggacgagcttgtgaaagtgatgggcagacacaagcccgagaacatcgtgatcgaaatggccagagagaaccagaccacacagaagggacagaagaacagccgcgagagaatgaagcggatcgaagagggcatcaaagagctgggcagccagatcctgaaagaacaccccgtggaaaacacccagctgcagaacgagaagctgtacctgtactacctgcagaatggacgggatatgtacgtggaccaagagctggacatcaacagactgtccgactacgatgtggaccatatcgtgccccagtcttttctgaaggacgactccatcgacaacaaggtcctgaccagatccgacaagaatcggggcaagagcgacaacgtgccctccgaagaggtggtcaagaagatgaagaactactggcgacagctgctgaacgccaagctgattacccagcggaagttcgacaatctgaccaaggccgaaagaggcggcctgagcgaactggataaggccggcttcatcaagagacagctggtggaaacccggcagatcacaaagcacgtggcacagattctggactctcggatgaacactaagtacgacgagaacgacaaactgatccgcgaagtgaaagtcatcaccctgaagtccaagctggtgtccgatttccggaaggatttccagttctacaaagtgcgcgagatcaacaactaccatcacgcccacgacgcctacctgaatgccgttgttggaacagccctgatcaaaaagtaccctaagctggaaagcgagttcgtgtacggcgactacaaggtgtacgacgtgcggaagatgatcgccaagagcgagcaagagattggcaaggcaaccgccaagtacttcttctacagcaacatcatgaactttttcaagacagagatcaccctcgccaacggcgagatcagaaagcggcctctgatcgagacaaacggcgaaaccggcgagattgtgtgggataagggcagagactttgccacagtgcggaaagtgctgagcatgccccaagtgaatatcgtgaagaaaaccgaggtgcagacaggcggcttcagcaaagagtctatcctgcctaagcggaactccgacaagctgatcgccagaaagaaggactgggaccccaagaagtacggcggcttcgattctcctaccgtggcctatagcgtgctggtggtggccaaagtggaaaagggcaagtccaagaaactcaagagcgtgaaagagctgctggggatcaccatcatggaaagaagcagcttcgagaagaatccgatcgatttcctcgaggccaagggctacaaagaagtgaaaaaggacctgatcatcaagctccccaagtactccctgttcgagctggaaaacggccggaagagaatgctggcctctgctggcgaactgcagaagggaaacgaactggccctgcctagcaaatatgtgaacttcctgtacctggccagccactatgagaagctgaagggcagccccgaggacaatgagcaaaagcagctgtttgtggaacagcacaagcactacctggacgagatcatcgagcagatcagcgagtttagcaagagagtgattctggccgacgccaatctggacaaagtgctgtccgcctacaacaagcaccgggacaagcctatcagagagcaggccgagaatatcatccacctgtttaccctgaccaacctgggagcccctgccgccttcaagtactttgacaccaccatcgaccggaagcggtacacctccaccaaagaggtgctggacgccactctgatccaccagtctatcaccggcctgtacgagacacggatcgacctgtctcaactcggaggcgacgaaggcgccgataagagaaccgccgatggctctgagttcgagagccccaagaaaaagcgcaaagtgtaatagtgagcggccgcttaattaagctgccttctgcggggcttgccttctggccaagcccttcttctctcccttgcacctgtacctcttggtctttgaataaagcctgagtaggaag

SEQ ID NO: 654 - protein, 1588 aa, synthetic construct
MSEVEFSHEYWMRHALTLAKRARDEREVPVGAVLVLNNRVIGEGWNRAIGLHDPTAHAQIMALRQGGLVMQNYRLYDATLYSTFEPCVMCAGAMIHSRIGRVVFGVRNAKTGAAGSLMDVLHHPGMNHRVEITEGILADECAALLCRFFRMPRRVFNAQKKAQSSTDSGGSSGGSSGSETPGTSESATPESSGGSSGGSDKKYSIGLAIGTNSVGWAVITDEYKVPSKKFKVLGNTDRHSIKKNLIGALLFDSGETAEATRLKRTARRRYTRRKNRICYLQEIFSNEMAKVDDSFFHRLEESFLVEEDKKHERHPIFGNIVDEVAYHEKYPTIYHLRKKLVDSTDKADLRLIYLALAHMIKFRGHFLIEGDLNPDNSDVDKLFIQLVQTYNQLFEENPINASGVDAKAILSARLSKSRRLENLIAQLPGEKKNGLFGNLIALSLGLTPNFKSNFDLAEDAKLQLSKDTYDDDLDNLLAQIGDQYADLFLAAKNLSDAILLSDILRVNTEITKAPLSASMIKRYDEHHQDLTLLKALVRQQLPEKYKEIFFDQSKNGYAGYIDGGASQEEFYKFIKPILEKMDGTEELLVKLNREDLLRKQRTFDNGSIPHQIHLGELHAILRRQEDFYPFLKDNREKIEKILTFRIPYYVGPLARGNSRFAWMTRKSEETITPWNFEEVVDKGASAQSFIERMTNFDKNLPNEKVLPKHSLLYEYFTVYNELTKVKYVTEGMRKPAFLSGEQKKAIVDLLFKTNRKVTVKQLKEDYFKKIECFDSVEISGVEDRFNASLGTYHDLLKIIKDKDFLDNEENEDILEDIVLTLTLFEDREMIEERLKTYAHLFDDKVMKQLKRRRYTGWGRLSRKLINGIRDKQSGKTILDFLKSDGFANRNFMQLIHDDSLTFKEDIQKAQVSGQGDSLHEHIANLAGSPAIKKGILQTVKVVDELVKVMGRHKPENIVIEMARENQTTQKGQKNSRERMKRIEEGIKELGSQILKEHPVENTQLQNEKLYLYYLQNGRDMYVDQELDINRLSDYDVDHIVPQSFLKDDSIDNKVLTRSDKNRGKSDNVPSEEVVKKMKNYWRQLLNAKLITQRKFDNLTKAERGGLSELDKAGFIKRQLVETRQITKHVAQILDSRMNTKYDENDKLIREVKVITLKSKLVSDFRKDFQFYKVREINNYHHAHDAYLNAVVGTALIKKYPKLESEFVYGDYKVYDVRKMIAKSEQEIGKATAKYFFYSNIMNFFKTEITLANGEIRKRPLIETNGETGEIVWDKGRDFATVRKVLSMPQVNIVKKTEVQTGGFSKESILPKRNSDKLIARKKDWDPKKYGGFDSPTVAYSVLVVAKVEKGKSKKLKSVKELLGITIMERSSFEKNPIDFLEAKGYKEVKKDLIIKLPKYSLFELENGRKRMLASAGELQKGNELALPSKYVNFLYLASHYEKLKGSPEDNEQKQLFVEQHKHYLDEIIEQISEFSKRVILADANLDKVLSAYNKHRDKPIREQAENIIHLFTLTNLGAPAAFKYFDTTIDRKRYTSTKEVLDATLIHQSITGLYETRIDLSQLGGDEGADKRTADGSEFESPKKKRKV

SEQ ID NO: 655 - DNA, 7613 bp, synthetic construct
  source 1..7613: mol_type = other DNA
tctagagtttaaacatttaaatctgcagatcccaatggcgcgccgagcttggctcgagcatggtcatagctgtttcctgtgtgaaattgttatccgctcacaattccacacaacatacgagccggaagcataaagtgtaaagcctggggtgcctaatgagtgagctaactcacattaattgcgttgcgctcactgcccgctttccagtcgggaaacctgtcgtgccagctgcattaatgaatcggccaacgcgcggggagaggcggtttgcgtattgggcactcttgcgcttcctcgctcactgactcgctgcgctcggtcgttcggctgcggcgagcggtatcagctcactcaaaggcggtaatacggttatccacagaatcaggggataacgcaggaaagaacatgtgagcaaaaggccagcaaaaggccaggaaccgtaaaaaggccgcgttgctggcgtttttccataggctccgcccccctgacgagcatcacaaaaatcgacgctcaagtcagaggtggcgaaacccgacaggactataaagataccaggcgtttccccctggaagctccctcgtgcgctctcctgttccgaccctgccgcttaccggatacctgtccgcctttctcccttcgggaagcgtggcgctttctcatagctcacgctgtaggtatctcagttcggtgtaggtcgttcgctccaagctgggctgtgtgcacgaaccccccgttcagcccgaccgctgcgccttatccggtaactatcgtcttgagtccaacccggtaagacacgacttatcgccactggcagcagccactggtaacaggattagcagagcgaggtatgtaggcggtgctacagagttcttgaagtggtggcctaactacggctacactagaagaacagtatttggtatctgcgctctgctgaagccagttaccttcggaaaaagagttggtagctcttgatccggcaaacaaaccaccgctggtagcggtggtttttttgtttgcaagcagcagattacgcgcagaaaaaaaggatctcaagaagatcctttgatcttttctacggggtctgacgctcagtggaacgaaaactcacgttaagggattttggtcatgagattatcaaaaaggatcttcacctagatccttttaaattaaaaatgaagttttaaatcaatctaaagtatatatgagtaaacttggtctgacagttagaaaaactcatcgagcatcaaatgaaactgcaatttattcatatcaggattatcaataccatatttttgaaaaagccgtttctgtaatgaaggagaaaactcaccgaggcagttccataggatggcaagatcctggtatcggtctgcgattccgactcgtccaacatcaatacaacctattaatttcccctcgtcaaaaataaggttatcaagtgagaaatcaccatgagtgacgactgaatccggtgagaatggcaaaagtttatgcatttctttccagacttgttcaacaggccagccattacgctcgtcatcaaaatcactcgcatcaaccaaaccgttattcattcgtgattgcgcctgagcgagacgaaatacgcgatcgctgttaaaaggacaattacaaacaggaatcgaatgcaaccggcgcaggaacactgccagcgcatcaacaatattttcacctgaatcaggatattcttctaatacctggaatgctgttttcccagggatcgcagtggtgagtaaccatgcatcatcaggagtacggataaaatgcttgatggtcggaagaggcataaattccgtcagccagtttagtctgaccatctcatctgtaacatcattggcaacgctacctttgccatgtttcagaaacaactctggcgcatcgggcttcccatacaatcgatagattgtcgcacctgattgcccgacattatcgcgagcccatttatacccatataaatcagcatccatgttggaatttaatcgcggcctagagcaagacgtttcccgttgaatatggctcatactcttcctttttcaatattattgaagcatttatcagggttattgtctcatgagcggatacatatttgaatgtatttagaaaaataaacaaataggggttccgcgcacatttccccgaaaagtgccacctgacgtctaagaaaccattattatcatgacattaacctataaaaataggcgtatcacgaggccctttcgtctcgcgcgtttcggtgatgacggtgaaaacctctgacacatgcagctcccggagacggtcacagcttgtctgtaagcggatgccgggagcagacaagcccgtcagggcgcgtcagcgggtgttggcgggtgtcggggctggcttaactatgcggcatcagagcagattgtactgagagtgcaccatatgcggtgtgaaataccgcacagatgcgtaaggagaaaataccgcatcaggcgccattcgccattcaggctgcgcaactgttgggaagggcgatcggtgcgggcctcttcgctattacgccagctggcgaaagggggatgtgctgcaaggcgattaagttgggtaacgccagggttttcccagtcacgacgttgtaaaacgacggccagtgaattgacgcgtattgggatcgagctcggtacctaatacgacacactataaggaaataagagagaaaagaagagtaagaagaaatataagagccaccatgagcgaggtcgagttctctcacgaatattggatgagacacgctctcaccctggctaagagagccagggacgaaagagaggtgccagttggcgctgtcctggtgttgaacaatcgcgtcatcggagaaggatggaatcgcgccattggcctgcacgatccaaccgcacatgcccagattatggctctgcggcaaggcggcctcgtgatgcaaaattacagactgtacgatgctaccctctactccaccttcgagccctgtgtcatgtgtgctggggcaatgattcactcccggattggccgcgtggtgtttggagtgcggaatgccaagactggcgccgctggatctctgatggacgtcctgcaccatcctgggatgaaccaccgggtcgagatcacagagggaattctggctgacgagtgcgctgccctgctgtgcaggttctttagaatgcctagaagggtgttcaacgcccagaaaaaagctcagagcagcaccgattccggcggaagcagcggaggatcttctggaagcgaaaccccaggcaccagcgagtctgccacaccagaatcatctggcggtagctccggcggcagcgacaagaagtactctatcggactggccatcggcaccaactctgttggatgggccgtgatcaccgacgagtacaaggtgcccagcaagaaattcaaggtgctgggcaacaccgaccggcacagcatcaagaagaatctgatcggcgccctgctgttcgactctggcgaaacagccgaagccaccagactgaagagaaccgccaggcggagatacacccggcggaagaaccggatctgctacctgcaagagatcttcagcaacgagatggccaaggtggacgacagcttcttccacagactggaagagtccttcctggtggaagaggacaagaagcacgagcggcaccccatcttcggcaacatcgtggatgaggtggcctaccacgagaagtaccccaccatctaccacctgagaaagaaactggtggacagcaccgacaaggccgacctgagactgatctacctggctctggcccacatgatcaagttccggggccactttctgatcgagggcgatctgaaccccgacaacagcgacgtggacaagctgttcatccagctggtgcagacctacaaccagctgttcgaggaaaaccccatcaacgcctctggcgtggacgccaaggctatcctgtctgccagactgagcaagagcagaaggctggaaaacctgatcgcccagctgcctggcgagaagaagaatggcctgttcggcaacctgattgccctgagcctgggactgacccctaacttcaagagcaacttcgacctggccgaggatgccaaactgcagctgagcaaggacacctacgacgacgacctggacaatctgctggcccagatcggcgatcagtacgccgacttgtttctggccgccaagaacctgtccgacgccatcctgctgagcgatatcctgagagtgaacaccgagatcacaaaggcccctctgagcgcctctatgatcaagagatacgacgagcaccaccaggatctgaccctgctgaaggccctcgttagacagcagctgccagagaagtacaaagagattttcttcgatcagtccaagaacggctacgccggctacattgatggcggagccagccaagaggaattctacaagttcatcaagcccatcctggaaaagatggacggcaccgaggaactgctggtcaagctgaacagagaggacctgctgcggaagcagcggaccttcgacaatggctctatccctcaccagatccacctgggagagctgcacgccattctgcggagacaagaggacttttacccattcctgaaggacaaccgggaaaagatcgagaagatcctgaccttcaggatcccctactacgtgggaccactggccagaggcaatagcagattcgcctggatgaccagaaagagcgaggaaaccatcacaccctggaacttcgaggaagtggtggacaagggcgccagcgctcagtccttcatcgagcggatgaccaacttcgataagaacctgcctaacgagaaggtgctgcccaagcactccctgctgtatgagtacttcaccgtgtacaacgagctgaccaaagtgaaatacgtgaccgagggaatgagaaagcccgcctttctgagcggcgagcagaaaaaggccattgtggatctgctgttcaagaccaaccggaaagtgaccgtgaagcagctgaaagaggactacttcaagaaaatcgagtgcttcgacagcgtggaaatcagcggcgtggaagatcggttcaatgccagcctgggcacataccacgacctgctgaaaattatcaaggacaaggacttcctggacaacgaagagaacgaggacattctcgaggacatcgtgctgaccctgacactgtttgaggacagagagatgatcgaggaacggctgaaaacatacgcccacctgttcgacgacaaagtgatgaagcaactgaagcggaggcggtacacaggctggggcagactgtctcggaagctgatcaacggcatccgggataagcagtccggcaagacaatcctggatttcctgaagtccgacggcttcgccaacagaaacttcatgcagctgatccacgacgacagcctgacctttaaagaggacatccagaaagcccaggtgtccggccaaggcgattctctgcacgagcacattgccaacctggccggatctcccgccattaagaagggcatcctgcagacagtgaaggtggtggacgagcttgtgaaagtgatgggcagacacaagcccgagaacatcgtgatcgaaatggccagagagaaccagaccacacagaagggccagaagaacagccgcgagagaatgaagcggatcgaagagggcatcaaagagctgggcagccagatcctgaaagaacaccccgtggaaaacacccagctgcagaacgagaagctgtacctgtactacctgcagaatggacgggatatgtacgtggaccaagagctggacatcaaccggctgagcgactacgatgtggaccatatcgtgccccagagctttctgaaggacgactccatcgataacaaggtcctgaccagaagcgacaagaaccggggcaagagcgataacgtgccctccgaagaggtggtcaagaagatgaagaactactggcgacagctgctgaacgccaagctgattacccagcggaagttcgataacctgaccaaggccgagagaggcggcctgagcgaacttgataaggccggcttcattaagcggcagctggtggaaacccggcagatcaccaaacacgtggcacagattctggactcccggatgaacactaagtacgacgagaatgacaagctgatccgggaagtgaaagtcatcaccctgaagtctaagctggtgtccgatttccggaaggatttccagttctacaaagtgcgggaaatcaacaactaccatcacgcccacgacgcctacctgaatgccgttgttggaacagccctgatcaagaagtatcccaagctggaaagcgagttcgtgtacggcgactacaaggtgtacgacgtgcggaagatgatcgccaagagcgaacaagagatcggcaaggctaccgccaagtactttttctacagcaacatcatgaactttttcaagacagagatcaccctggccaacggcgagatccggaaaagacccctgatcgagacaaacggcgaaaccggggagatcgtgtgggataagggcagagattttgccacagtgcggaaagtgctgagcatgccccaagtgaatatcgtgaagaaaaccgaggtgcagacaggcggcttcagcaaagagtctatcctgcctaagcggaacagcgataagctgatcgccagaaagaaggactgggaccccaagaaatacggcggcttcgtgtctcctaccgtggcctattctgtgctggtggtggccaaagtggaaaagggcaagtccaaaaagctcaagagcgtgaaagagctgctggggatcaccatcatggaaagaagcagctttgagaagaacccgatcgactttctggaagccaagggctacaaagaagtcaagaaggacctcatcatcaagctccccaagtacagcctgttcgagctggaaaatggccggaagcggatgctggcctctgctagagaactgcagaagggaaacgagctggccctgcctagcaaatatgtgaacttcctgtacctggccagccactatgagaagctgaagggcagccccgaggacaatgagcaaaagcagctgtttgtggaacagcacaagcactacctggacgagatcatcgagcagatcagcgagttctccaagagagtgatcctggccgacgctaacctggataaggtgctgtctgcctataacaagcaccgggacaagcctatcagagagcaggccgagaatatcatccacctgtttaccctgaccaacctgggagcccctgccgccttcaagtacttcgacaccaccatcgaccggaagcagtaccggtccaccaaagaggtgctggacgccacactgatccaccagtctatcaccggcctgtacgaaacccggatcgacctgtctcagctcggaggcgacgaaggcgccgataagagaaccgccgatggctctgagttcgagagccccaagaaaaagcgcaaagtgtaatagtgagcggccgcttaattaagctgccttctgcggggcttgccttctggccaagcccttcttctctcccttgcacctgtacctcttggtctttgaataaagcctgagtaggaag

SEQ ID NO: 656 - protein, 1588 aa, synthetic construct
MSEVEFSHEYWMRHALTLAKRARDEREVPVGAVLVLNNRVIGEGWNRAIGLHDPTAHAQIMALRQGGLVMQNYRLYDATLYSTFEPCVMCAGAMIHSRIGRVVFGVRNAKTGAAGSLMDVLHHPGMNHRVEITEGILADECAALLCRFFRMPRRVFNAQKKAQSSTDSGGSSGGSSGSETPGTSESATPESSGGSSGGSDKKYSIGLAIGTNSVGWAVITDEYKVPSKKFKVLGNTDRHSIKKNLIGALLFDSGETAEATRLKRTARRRYTRRKNRICYLQEIFSNEMAKVDDSFFHRLEESFLVEEDKKHERHPIFGNIVDEVAYHEKYPTIYHLRKKLVDSTDKADLRLIYLALAHMIKFRGHFLIEGDLNPDNSDVDKLFIQLVQTYNQLFEENPINASGVDAKAILSARLSKSRRLENLIAQLPGEKKNGLFGNLIALSLGLTPNFKSNFDLAEDAKLQLSKDTYDDDLDNLLAQIGDQYADLFLAAKNLSDAILLSDILRVNTEITKAPLSASMIKRYDEHHQDLTLLKALVRQQLPEKYKEIFFDQSKNGYAGYIDGGASQEEFYKFIKPILEKMDGTEELLVKLNREDLLRKQRTFDNGSIPHQIHLGELHAILRRQEDFYPFLKDNREKIEKILTFRIPYYVGPLARGNSRFAWMTRKSEETITPWNFEEVVDKGASAQSFIERMTNFDKNLPNEKVLPKHSLLYEYFTVYNELTKVKYVTEGMRKPAFLSGEQKKAIVDLLFKTNRKVTVKQLKEDYFKKIECFDSVEISGVEDRFNASLGTYHDLLKIIKDKDFLDNEENEDILEDIVLTLTLFEDREMIEERLKTYAHLFDDKVMKQLKRRRYTGWGRLSRKLINGIRDKQSGKTILDFLKSDGFANRNFMQLIHDDSLTFKEDIQKAQVSGQGDSLHEHIANLAGSPAIKKGILQTVKVVDELVKVMGRHKPENIVIEMARENQTTQKGQKNSRERMKRIEEGIKELGSQILKEHPVENTQLQNEKLYLYYLQNGRDMYVDQELDINRLSDYDVDHIVPQSFLKDDSIDNKVLTRSDKNRGKSDNVPSEEVVKKMKNYWRQLLNAKLITQRKFDNLTKAERGGLSELDKAGFIKRQLVETRQITKHVAQILDSRMNTKYDENDKLIREVKVITLKSKLVSDFRKDFQFYKVREINNYHHAHDAYLNAVVGTALIKKYPKLESEFVYGDYKVYDVRKMIAKSEQEIGKATAKYFFYSNIMNFFKTEITLANGEIRKRPLIETNGETGEIVWDKGRDFATVRKVLSMPQVNIVKKTEVQTGGFSKESILPKRNSDKLIARKKDWDPKKYGGFVSPTVAYSVLVVAKVEKGKSKKLKSVKELLGITIMERSSFEKNPIDFLEAKGYKEVKKDLIIKLPKYSLFELENGRKRMLASARELQKGNELALPSKYVNFLYLASHYEKLKGSPEDNEQKQLFVEQHKHYLDEIIEQISEFSKRVILADANLDKVLSAYNKHRDKPIREQAENIIHLFTLTNLGAPAAFKYFDTTIDRKQYRSTKEVLDATLIHQSITGLYETRIDLSQLGGDEGADKRTADGSEFESPKKKRKV

SEQ ID NO: 657 - DNA, 6668 bp, synthetic construct
  source 1..6668: mol_type = other DNA
tctagagtttaaacatttaaatctgcagatcccaatggcgcgccgagcttggctcgagcatggtcatagctgtttcctgtgtgaaattgttatccgctcacaattccacacaacatacgagccggaagcataaagtgtaaagcctggggtgcctaatgagtgagctaactcacattaattgcgttgcgctcactgcccgctttccagtcgggaaacctgtcgtgccagctgcattaatgaatcggccaacgcgcggggagaggcggtttgcgtattgggcactcttgcgcttcctcgctcactgactcgctgcgctcggtcgttcggctgcggcgagcggtatcagctcactcaaaggcggtaatacggttatccacagaatcaggggataacgcaggaaagaacatgtgagcaaaaggccagcaaaaggccaggaaccgtaaaaaggccgcgttgctggcgtttttccataggctccgcccccctgacgagcatcacaaaaatcgacgctcaagtcagaggtggcgaaacccgacaggactataaagataccaggcgtttccccctggaagctccctcgtgcgctctcctgttccgaccctgccgcttaccggatacctgtccgcctttctcccttcgggaagcgtggcgctttctcatagctcacgctgtaggtatctcagttcggtgtaggtcgttcgctccaagctgggctgtgtgcacgaaccccccgttcagcccgaccgctgcgccttatccggtaactatcgtcttgagtccaacccggtaagacacgacttatcgccactggcagcagccactggtaacaggattagcagagcgaggtatgtaggcggtgctacagagttcttgaagtggtggcctaactacggctacactagaagaacagtatttggtatctgcgctctgctgaagccagttaccttcggaaaaagagttggtagctcttgatccggcaaacaaaccaccgctggtagcggtggtttttttgtttgcaagcagcagattacgcgcagaaaaaaaggatctcaagaagatcctttgatcttttctacggggtctgacgctcagtggaacgaaaactcacgttaagggattttggtcatgagattatcaaaaaggatcttcacctagatccttttaaattaaaaatgaagttttaaatcaatctaaagtatatatgagtaaacttggtctgacagttagaaaaactcatcgagcatcaaatgaaactgcaatttattcatatcaggattatcaataccatatttttgaaaaagccgtttctgtaatgaaggagaaaactcaccgaggcagttccataggatggcaagatcctggtatcggtctgcgattccgactcgtccaacatcaatacaacctattaatttcccctcgtcaaaaataaggttatcaagtgagaaatcaccatgagtgacgactgaatccggtgagaatggcaaaagtttatgcatttctttccagacttgttcaacaggccagccattacgctcgtcatcaaaatcactcgcatcaaccaaaccgttattcattcgtgattgcgcctgagcgagacgaaatacgcgatcgctgttaaaaggacaattacaaacaggaatcgaatgcaaccggcgcaggaacactgccagcgcatcaacaatattttcacctgaatcaggatattcttctaatacctggaatgctgttttcccagggatcgcagtggtgagtaaccatgcatcatcaggagtacggataaaatgcttgatggtcggaagaggcataaattccgtcagccagtttagtctgaccatctcatctgtaacatcattggcaacgctacctttgccatgtttcagaaacaactctggcgcatcgggcttcccatacaatcgatagattgtcgcacctgattgcccgacattatcgcgagcccatttatacccatataaatcagcatccatgttggaatttaatcgcggcctagagcaagacgtttcccgttgaatatggctcatactcttcctttttcaatattattgaagcatttatcagggttattgtctcatgagcggatacatatttgaatgtatttagaaaaataaacaaataggggttccgcgcacatttccccgaaaagtgccacctgacgtctaagaaaccattattatcatgacattaacctataaaaataggcgtatcacgaggccctttcgtctcgcgcgtttcggtgatgacggtgaaaacctctgacacatgcagctcccggagacggtcacagcttgtctgtaagcggatgccgggagcagacaagcccgtcagggcgcgtcagcgggtgttggcgggtgtcggggctggcttaactatgcggcatcagagcagattgtactgagagtgcaccatatgcggtgtgaaataccgcacagatgcgtaaggagaaaataccgcatcaggcgccattcgccattcaggctgcgcaactgttgggaagggcgatcggtgcgggcctcttcgctattacgccagctggcgaaagggggatgtgctgcaaggcgattaagttgggtaacgccagggttttcccagtcacgacgttgtaaaacgacggccagtgaattgacgcgtattgggatcgagctcggtacctaatacgacacactataaggaaataagagagaaaagaagagtaagaagaaatataagagccaccatgagcgaggtcgagttctctcacgaatattggatgagacacgctctcaccctggctaagagagccagggacgaaagagaggtgccagttggcgctgtcctggtgttgaacaatcgcgtcatcggagaaggatggaatcgcgccattggcctgcacgatccaaccgcacatgcccagattatggctctgcggcaaggcggcctcgtgatgcaaaattacagactgtacgatgctaccctctactccaccttcgagccctgtgtcatgtgtgctggggcaatgattcactcccggattggccgcgtggtgtttggagtgcggaatgccaagactggcgccgctggatctctgatggacgtcctgcaccatcctgggatgaaccaccgggtcgagatcacagagggaattctggctgacgagtgcgctgccctgctgtgcaggttctttagaatgcctagaagggtgttcaacgcccagaaaaaagctcagagcagcaccgattccggcggaagcagcggaggatcttctggaagcgaaaccccaggcaccagcgagtctgccacaccagaatcatctggcggtagctccggcggcagcaagagaaattacatcctgggcctcgccatcggcatcacctctgtcggctacggcatcatcgactacgagacacgggatgtgattgatgccggcgtgcggctgttcaaagaggccaacgtcgagaacaacgagggccgcagatctaagaggggagccagacggctgaagagaaggcggagacacagaatccagagagtgaagaagctgctgttcgactacaacctgctgaccgaccacagcgagctgagcggcatcaacccttatgaggccagagtgaagggcctgagccagaagctgagcgaggaagagtttagcgccgcactgctgcacctggccaagagaagaggcgtgcacaacgtgaacgaagtggaagaggacaccggcaacgagctgtccaccaaagagcagatcagcagaaacagcaaggccctggaagagaaatacgtggccgaactgcagctggaacggctgaaaaaggatggcgaagtgcggggcagcatcaaccggttcaagaccagcgactacgtgaaagaagccaaacagctgctgaaggtgcagaaggcctaccaccagctggaccagagcttcatcgacacctacatcgacctgctggaaacccggcggacctactatgaaggacctggcgagggaagccccttcggctggaaggacatcaaagaatggtacgagatgctgatgggccactgcacctactttcccgaggaactgcggagcgtgaagtacgcctacaacgccgacctgtacaacgccctgaacgacctgaacaacctcgtgatcacccgggacgagaacgagaagctggaatattacgagaagttccagatcatcgagaacgtgttcaagcagaagaagaagcccacactgaagcagatcgccaaagagatcctggtcaacgaggaagatatcaagggctacagagtgaccagcaccggcaagcccgagttcaccaacctgaaggtgtaccacgacatcaaggatatcacagcccggaaagagattattgagaacgccgagctgctggaccaaatcgccaagatcctgaccatctaccagtcctccgaggacatccaagaggaactgaccaatctgaactccgagctgacccaagaagagatcgagcagatctctaatctgaaggggtacacaggcacccacaacctgagcctgaaggccatcaacctgatcctggacgagctgtggcacaccaacgacaaccagattgccatcttcaaccggctgaagctggtgcccaagaaggtggacctcagccagcagaaagaaatccccaccacactggtggacgacttcattctgagccccgtggtcaagagaagcttcatccagagcatcaaagtgatcaacgccatcatcaagaagtacgggctgcccaacgatatcatcatcgagctggcccgcgagaagaactccaaggacgctcagaaaatgatcaacgagatgcagaagcggaaccggcagaccaacgagcggatcgaggaaatcatccggaccaccggcaaagagaacgccaagtacctgatcgagaagatcaagctgcacgacatgcaagagggcaagtgtctgtacagcctggaagccattcctctggaagatctgctgaacaatcccttcaactacgaggtggaccacatcatccccagaagcgtgtccttcgacaacagcttcaacaacaaggtgctcgtgaagcaagaggaaaactccaagaagggcaacagaaccccattccagtacctgagcagctccgacagcaaaatcagctacgaaaccttcaagaagcacatcctgaatctggccaaaggcaagggccgcatcagcaagaccaagaaagaatacctgctcgaggaacgggacatcaacagattcagcgtgcagaaagacttcatcaatcggaacctggtggacaccagatacgccaccagaggcctgatgaatctgctgagaagctacttccgcgtgaacaatctggacgtgaaagtcaagtccatcaacggcggcttcaccagctttctgcggagaaagtggaagttcaagaaagagcggaacaagggctataagcaccacgccgaggacgccctgatcattgccaacgccgatttcatcttcaaagagtggaagaaactggacaaggccaaaaaagtgatggaaaaccagatgttcgaggaaaagcaggccgagagcatgcccgagatcgaaaccgagcaagagtacaaagagattttcatcacgccccaccagatcaagcacattaaggacttcaaggactacaagtacagccaccgcgtggacaagaagcctaatagagagctgattaacgacaccctgtacagcacccggaaggacgacaagggcaataccctgatcgtcaacaacctgaacggcctgtacgacaaggacaacgacaagctcaagaagctgatcaacaagagccccgagaaactgctgatgtaccaccacgatcctcagacctaccagaaactgaagctcatcatggaacagtacggcgacgagaagaatcccctgtacaagtactacgaggaaaccgggaactacctgaccaagtactccaaaaaggacaatgggcccgtgatcaagaagattaagtattacggcaacaagctgaatgcccacctggacatcaccgacgactaccccaactccagaaacaaggtggtcaagctgtccctgaagccttacagattcgacgtgtacctggacaacggcgtgtacaagttcgtgaccgtgaagaacctggatgtgatcaaaaaagaaaactactacgaagtgaacagcaagtgctatgaggaagccaagaaactcaagaaaatcagcaaccaggccgagtttatcgcctccttctacaacaacgatctgatcaagatcaacggggagctgtatagagtgattggggtcaacaatgacctgctgaaccggatcgaagtcaacatgatcgacatcacctaccgcgagtacctcgagaacatgaacgacaagaggcctccacggatcattaagacaatcgccagcaagacgcagagcattaagaagtacagcactgacattctgggcaacctgtacgaagtcaagagcaaaaagcacccgcagattatcaagaaaggcgagggcgccgacaagagaacagccgatggttccgagttcgaaagccccaagaagaagaggaaagtctaatagtgagcggccgcttaattaagctgccttctgcggggcttgccttctggccaagcccttcttctctcccttgcacctgtacctcttggtctttgaataaagcctgagtaggaag

SEQ ID NO: 658 - protein, 1273 aa, synthetic construct
MSEVEFSHEYWMRHALTLAKRARDEREVPVGAVLVLNNRVIGEGWNRAIGLHDPTAHAQIMALRQGGLVMQNYRLYDATLYSTFEPCVMCAGAMIHSRIGRVVFGVRNAKTGAAGSLMDVLHHPGMNHRVEITEGILADECAALLCRFFRMPRRVFNAQKKAQSSTDSGGSSGGSSGSETPGTSESATPESSGGSSGGSKRNYILGLAIGITSVGYGIIDYETRDVIDAGVRLFKEANVENNEGRRSKRGARRLKRRRRHRIQRVKKLLFDYNLLTDHSELSGINPYEARVKGLSQKLSEEEFSAALLHLAKRRGVHNVNEVEEDTGNELSTKEQISRNSKALEEKYVAELQLERLKKDGEVRGSINRFKTSDYVKEAKQLLKVQKAYHQLDQSFIDTYIDLLETRRTYYEGPGEGSPFGWKDIKEWYEMLMGHCTYFPEELRSVKYAYNADLYNALNDLNNLVITRDENEKLEYYEKFQIIENVFKQKKKPTLKQIAKEILVNEEDIKGYRVTSTGKPEFTNLKVYHDIKDITARKEIIENAELLDQIAKILTIYQSSEDIQEELTNLNSELTQEEIEQISNLKGYTGTHNLSLKAINLILDELWHTNDNQIAIFNRLKLVPKKVDLSQQKEIPTTLVDDFILSPVVKRSFIQSIKVINAIIKKYGLPNDIIIELAREKNSKDAQKMINEMQKRNRQTNERIEEIIRTTGKENAKYLIEKIKLHDMQEGKCLYSLEAIPLEDLLNNPFNYEVDHIIPRSVSFDNSFNNKVLVKQEENSKKGNRTPFQYLSSSDSKISYETFKKHILNLAKGKGRISKTKKEYLLEERDINRFSVQKDFINRNLVDTRYATRGLMNLLRSYFRVNNLDVKVKSINGGFTSFLRRKWKFKKERNKGYKHHAEDALIIANADFIFKEWKKLDKAKKVMENQMFEEKQAESMPEIETEQEYKEIFITPHQIKHIKDFKDYKYSHRVDKKPNRELINDTLYSTRKDDKGNTLIVNNLNGLYDKDNDKLKKLINKSPEKLLMYHHDPQTYQKLKLIMEQYGDEKNPLYKYYEETGNYLTKYSKKDNGPVIKKIKYYGNKLNAHLDITDDYPNSRNKVVKLSLKPYRFDVYLDNGVYKFVTVKNLDVIKKENYYEVNSKCYEEAKKLKKISNQAEFIASFYNNDLIKINGELYRVIGVNNDLLNRIEVNMIDITYREYLENMNDKRPPRIIKTIASKTQSIKKYSTDILGNLYEVKSKKHPQIIKKGEGADKRTADGSEFESPKKKRKV

SEQ ID NO: 659 - DNA, 6767 bp, synthetic construct
  source 1..6767: mol_type = other DNA
tctagagtttaaacatttaaatctgcagatcccaatggcgcgccgagcttggctcgagcatggtcatagctgtttcctgtgtgaaattgttatccgctcacaattccacacaacatacgagccggaagcataaagtgtaaagcctggggtgcctaatgagtgagctaactcacattaattgcgttgcgctcactgcccgctttccagtcgggaaacctgtcgtgccagctgcattaatgaatcggccaacgcgcggggagaggcggtttgcgtattgggcactcttgcgcttcctcgctcactgactcgctgcgctcggtcgttcggctgcggcgagcggtatcagctcactcaaaggcggtaatacggttatccacagaatcaggggataacgcaggaaagaacatgtgagcaaaaggccagcaaaaggccaggaaccgtaaaaaggccgcgttgctggcgtttttccataggctccgcccccctgacgagcatcacaaaaatcgacgctcaagtcagaggtggcgaaacccgacaggactataaagataccaggcgtttccccctggaagctccctcgtgcgctctcctgttccgaccctgccgcttaccggatacctgtccgcctttctcccttcgggaagcgtggcgctttctcatagctcacgctgtaggtatctcagttcggtgtaggtcgttcgctccaagctgggctgtgtgcacgaaccccccgttcagcccgaccgctgcgccttatccggtaactatcgtcttgagtccaacccggtaagacacgacttatcgccactggcagcagccactggtaacaggattagcagagcgaggtatgtaggcggtgctacagagttcttgaagtggtggcctaactacggctacactagaagaacagtatttggtatctgcgctctgctgaagccagttaccttcggaaaaagagttggtagctcttgatccggcaaacaaaccaccgctggtagcggtggtttttttgtttgcaagcagcagattacgcgcagaaaaaaaggatctcaagaagatcctttgatcttttctacggggtctgacgctcagtggaacgaaaactcacgttaagggattttggtcatgagattatcaaaaaggatcttcacctagatccttttaaattaaaaatgaagttttaaatcaatctaaagtatatatgagtaaacttggtctgacagttagaaaaactcatcgagcatcaaatgaaactgcaatttattcatatcaggattatcaataccatatttttgaaaaagccgtttctgtaatgaaggagaaaactcaccgaggcagttccataggatggcaagatcctggtatcggtctgcgattccgactcgtccaacatcaatacaacctattaatttcccctcgtcaaaaataaggttatcaagtgagaaatcaccatgagtgacgactgaatccggtgagaatggcaaaagtttatgcatttctttccagacttgttcaacaggccagccattacgctcgtcatcaaaatcactcgcatcaaccaaaccgttattcattcgtgattgcgcctgagcgagacgaaatacgcgatcgctgttaaaaggacaattacaaacaggaatcgaatgcaaccggcgcaggaacactgccagcgcatcaacaatattttcacctgaatcaggatattcttctaatacctggaatgctgttttcccagggatcgcagtggtgagtaaccatgcatcatcaggagtacggataaaatgcttgatggtcggaagaggcataaattccgtcagccagtttagtctgaccatctcatctgtaacatcattggcaacgctacctttgccatgtttcagaaacaactctggcgcatcgggcttcccatacaatcgatagattgtcgcacctgattgcccgacattatcgcgagcccatttatacccatataaatcagcatccatgttggaatttaatcgcggcctagagcaagacgtttcccgttgaatatggctcatactcttcctttttcaatattattgaagcatttatcagggttattgtctcatgagcggatacatatttgaatgtatttagaaaaataaacaaataggggttccgcgcacatttccccgaaaagtgccacctgacgtctaagaaaccattattatcatgacattaacctataaaaataggcgtatcacgaggccctttcgtctcgcgcgtttcggtgatgacggtgaaaacctctgacacatgcagctcccggagacggtcacagcttgtctgtaagcggatgccgggagcagacaagcccgtcagggcgcgtcagcgggtgttggcgggtgtcggggctggcttaactatgcggcatcagagcagattgtactgagagtgcaccatatgcggtgtgaaataccgcacagatgcgtaaggagaaaataccgcatcaggcgccattcgccattcaggctgcgcaactgttgggaagggcgatcggtgcgggcctcttcgctattacgccagctggcgaaagggggatgtgctgcaaggcgattaagttgggtaacgccagggttttcccagtcacgacgttgtaaaacgacggccagtgaattgacgcgtattgggatcgagctcggtacctaatacgacacactataaggaaataagagagaaaagaagagtaagaagaaatataagagccaccatgagcgaggtcgagttctctcacgaatattggatgagacacgctctcaccctggctaagagagccagggacgaaagagaggtgccagttggcgctgtcctggtgttgaacaatcgcgtcatcggagaaggatggaatcgcgccattggcctgcacgatccaaccgcacatgcccagattatggctctgcggcaaggcggcctcgtgatgcaaaattacagactgtacgatgctaccctctactccaccttcgagccctgtgtcatgtgtgctggggcaatgattcactcccggattggccgcgtggtgtttggagtgcggaatgccaagactggcgccgctggatctctgatggacgtcctgcaccatcctgggatgaaccaccgggtcgagatcacagagggaattctggctgacgagtgcgctgccctgctgtgcaggttctttagaatgcctagaagggtgttcaacgcccagaaaaaagctcagagcagcaccgattccggcggaagcagcggaggatcttctggaagcgaaaccccaggcaccagcgagtctgccacaccagaatcatctggcggtagctccggcggcagcaagagaaattacatcctcggactggccatcggcatcacctctgtcggctacggcatcatcgactacgagacacgggacgtgatcgatgccggcgtgcggctgtttaaagaggccaacgtcgagaacaacgagggccgcagatctaagagaggcgccagacggctgaagagaagaagaaggcaccggatccagagagtgaagaagctgctgttcgactacaacctgctgaccgaccacagcgagctgagcggcatcaatccttacgaggccagagtgaagggcctgagccagaagctgagcgaggaagagtttagcgctgccctgctgcacctggccaagagaagaggcgtgcacaacgtgaacgaggtggaagaggacaccggcaacgagctgtccaccaaagagcagatcagccggaacagcaaggccctggaagagaaatacgtggccgaactgcagctggaacggctgaaaaaggatggcgaagtgcggggcagcatcaaccggttcaagaccagcgactacgtgaaagaagccaaacagctgctgaaggtgcagaaggcctaccaccagctggaccagagcttcatcgacacctacatcgacctgctggaaacccggcggacctactatgaaggacctggcgagggaagccccttcggctggaaggacatcaaagaatggtacgagatgctgatgggccactgcacctactttcccgaggaactgcggagcgtgaagtacgcctacaacgccgacctgtacaacgccctgaacgacctgaacaacctcgtgatcacccgggacgagaacgagaagctggaatattacgagaagttccaaatcatcgagaacgtgttcaagcagaagaaaaagcccacgctgaagcagatcgccaaagagatcctggtcaacgaggaagatatcaagggctacagagtgaccagcaccggcaagcccgagttcaccaacctgaaggtgtaccacgacatcaaggatatcacagcccggaaagaaatcattgagaatgccgagctgctcgaccagattgccaagatcctgaccatctaccagagcagcgaggacatccaagaggaactgaccaatctgaactccgagctgacccaagaagagatcgaacagatcagcaatctgaaggggtacaccggcacacacaacctgagcctgaaggccatcaacctgatcctggacgagctgtggcacaccaacgacaaccagatcgctatcttcaaccggctgaagctggtgcccaagaaggtggacctgtctcagcagaaagagattcccaccacactggtggacgacttcattctgagccccgtggtcaagagaagcttcatccagagcatcaaagtgatcaacgccatcatcaagaagtacgggctgcccaacgatatcatcatcgagctggcccgcgagaagaactccaaggacgcccagaaaatgatcaacgagatgcagaagcggaaccggcagaccaacgagcggatcgaggaaatcatccggaccaccggcaaagagaacgccaagtacctgatcgagaagatcaagctgcacgacatgcaagagggcaagtgcctgtacagcctggaagccattcctctggaagatctgctgaacaatcccttcaactatgaggtggaccacatcatccccagaagcgtgtccttcgacaacagcttcaacaacaaggtgctcgtgaagcaagaggaaaacagcaagaagggcaacagaaccccattccagtacctgagcagctccgacagcaagatcagctacgaaaccttcaagaagcacatcctgaatctggccaaaggcaagggcagaatcagcaagaccaagaaagagtatctgctcgaggaacgggacatcaacagattcagcgtgcagaaagacttcatcaatcggaacctggtggacaccagatacgccaccagaggcctgatgaatctgctgcggagctacttcagagtgaacaatctggacgtgaaagtcaagtccatcaacggcggcttcaccagctttctgcggcggaagtggaagtttaagaaagagcggaacaagggctataagcaccatgccgaggacgccctgatcattgccaacgccgatttcatcttcaaagagtggaagaaactggacaaggccaaaaaagtgatggaaaaccagatgttcgaggaaaagcaggccgagagcatgcccgagatcgagactgagcaagagtacaaagagattttcatcacgccccaccagatcaagcacattaaggacttcaaggactacaagtacagccaccgcgtggacaagaagcccaaccggaagctgatcaatgacacactgtacagcacccggaaggacgacaagggcaataccctgatcgtcaacaacctgaacggcctgtacgacaaggacaacgacaagctcaagaagctgattaacaagagccccgagaagctcctgatgtaccatcacgaccctcagacctaccagaaactgaagctcatcatggaacagtacggcgacgagaaaaacccgctgtacaagtactacgaggaaaccggaaactacctgaccaagtactccaaaaaggacaatgggcccgtgatcaagaagattaagtattacggcaacaagctgaatgcccacctggacatcaccgacgactaccccaacagcagaaacaaggtggtcaagctgtccctgaagccttacagattcgacgtgtacctggacaacggcgtgtacaagttcgtgaccgtgaagaacctggacgtcatcaaaaaagaaaactactacgaagtcaacagcaagtgctatgaggaagccaagaaactcaagaaaatcagcaaccaggccgagtttatcgccagcttctacaagaacgacctcatcaagatcaacggggagctgtatagagtgatcggggtcaacaatgacctgctgaaccggatcgaagtgaacatgatcgacatcacctaccgcgagtacctcgagaacatgaacgataagcggccaccgcacatcattaagacaatcgccagcaagacgcagagcattaagaagtacagcacagacatcctggggaacctgtacgaagtgaagtccaaaaagcacccgcagattatcaagaaaggcggcagccccaagaaaaaaagaaaggtttcctccgactacaaggaccacgatggcgattataaggatcacgacatcgattacaaggacgatgacgacaaggaaggcgccgataagagaaccgccgatggctctgagttcgagagccccaagaaaaagcgcaaagtgtaatagtgagcggccgcttaattaagctgccttctgcggggcttgccttctggccaagcccttcttctctcccttgcacctgtacctcttggtctttgaataaagcctgagtaggaag

SEQ ID NO: 660 - protein, 1306 aa, synthetic construct
MSEVEFSHEYWMRHALTLAKRARDEREVPVGAVLVLNNRVIGEGWNRAIGLHDPTAHAQIMALRQGGLVMQNYRLYDATLYSTFEPCVMCAGAMIHSRIGRVVFGVRNAKTGAAGSLMDVLHHPGMNHRVEITEGILADECAALLCRFFRMPRRVFNAQKKAQSSTDSGGSSGGSSGSETPGTSESATPESSGGSSGGSKRNYILGLAIGITSVGYGIIDYETRDVIDAGVRLFKEANVENNEGRRSKRGARRLKRRRRHRIQRVKKLLFDYNLLTDHSELSGINPYEARVKGLSQKLSEEEFSAALLHLAKRRGVHNVNEVEEDTGNELSTKEQISRNSKALEEKYVAELQLERLKKDGEVRGSINRFKTSDYVKEAKQLLKVQKAYHQLDQSFIDTYIDLLETRRTYYEGPGEGSPFGWKDIKEWYEMLMGHCTYFPEELRSVKYAYNADLYNALNDLNNLVITRDENEKLEYYEKFQIIENVFKQKKKPTLKQIAKEILVNEEDIKGYRVTSTGKPEFTNLKVYHDIKDITARKEIIENAELLDQIAKILTIYQSSEDIQEELTNLNSELTQEEIEQISNLKGYTGTHNLSLKAINLILDELWHTNDNQIAIFNRLKLVPKKVDLSQQKEIPTTLVDDFILSPVVKRSFIQSIKVINAIIKKYGLPNDIIIELAREKNSKDAQKMINEMQKRNRQTNERIEEIIRTTGKENAKYLIEKIKLHDMQEGKCLYSLEAIPLEDLLNNPFNYEVDHIIPRSVSFDNSFNNKVLVKQEENSKKGNRTPFQYLSSSDSKISYETFKKHILNLAKGKGRISKTKKEYLLEERDINRFSVQKDFINRNLVDTRYATRGLMNLLRSYFRVNNLDVKVKSINGGFTSFLRRKWKFKKERNKGYKHHAEDALIIANADFIFKEWKKLDKAKKVMENQMFEEKQAESMPEIETEQEYKEIFITPHQIKHIKDFKDYKYSHRVDKKPNRKLINDTLYSTRKDDKGNTLIVNNLNGLYDKDNDKLKKLINKSPEKLLMYHHDPQTYQKLKLIMEQYGDEKNPLYKYYEETGNYLTKYSKKDNGPVIKKIKYYGNKLNAHLDITDDYPNSRNKVVKLSLKPYRFDVYLDNGVYKFVTVKNLDVIKKENYYEVNSKCYEEAKKLKKISNQAEFIASFYKNDLIKINGELYRVIGVNNDLLNRIEVNMIDITYREYLENMNDKRPPHIIKTIASKTQSIKKYSTDILGNLYEVKSKKHPQIIKKGGSPKKKRKVSSDYKDHDGDYKDHDIDYKDDDDKEGADKRTADGSEFESPKKKRKV
